(19) United States
(12) Patent Application Publication
(10) Pub. No.: US 2025/0354156 A1
(43) Pub. Date: Nov. 20, 2025

(54) Compositions and Methods for Treating Cancer

(71) Applicant: bioAffinity Technologies, Inc., San Antonio, TX (US)

(72) Inventors: David J. Elzi, San Antonio, TX (US); William E. Bauta, San Antonio, TX (US); Vivienne I. Rebel, San Antonio, TX (US)

(73) Assignee: bioAffinity Technologies, Inc., San Antonio, TX (US)

(21) Appl. No.: 19/212,343

(22) Filed: May 19, 2025

Related U.S. Application Data
(63) Continuation of application No. 17/359,905, filed on Jun. 28, 2021, now Pat. No. 12,305,171.
Application No. 17/359,905 is a continuation-in-part of application No. PCT/US2019/068423, filed on Dec. 23, 2019.
(60) Provisional application No. 62/785,592, filed on Dec. 27, 2018.
(60) Provisional application No. 63/044,771, filed on Jun. 26, 2020.

(51) Int. Cl. C12N 15/113

(52) U.S. Cl. CPC C12N 15/1138; C12N 2310/14; C12N 2310/315; C12N 2320/30

(57) ABSTRACT

A method of inhibiting skin cancer by administering to a subject in need thereof a double stranded RNA interference (RNAi) agent comprising at least one of (i) a first double-stranded ribonucleic acid (dsRNA) for inhibiting the expression of a CD320 gene wherein the first dsRNA comprises a sense strand and an antisense strand forming a duplex, and (ii) a second dsRNA for inhibiting the expression of a LRP2 gene wherein the second dsRNA comprises a sense strand and an antisense strand forming a duplex, wherein the sense strand of the first dsRNA is at least substantially complementary to the antisense strand of the first dsRNA and the sense strand of the second dsRNA is at least substantially complementary to the antisense strand of the second dsRNA and the use of the RNAi agent as a pharmaceutical composition for the treatment of cancer in subjects in need of treatment.

### CROSS-REFERENCE TO RELATED APPLICATIONS

[0001] This application is a continuation application of U.S. patent application Ser. No. 17/359,905, filed on Jun. 28, 2021, titled “Compositions and Methods for Treating Cancer”, which is a Continuation-In-Part application of International Patent Application No. PCT/US2019/068423, filed on Dec. 23, 2019, titled “Compositions and Methods for Treating Cancer”, which claim priority to and the benefit of U.S. Provisional Patent Application No. 62/785,592, titled “Compositions and Methods for Treating Cancer”, filed on Dec. 27, 2018. U.S. patent application Ser. No. 17/359,905 also claims priority to and the benefit of the filing of U.S. Provisional Patent Application No. 63/044,771, filed on Jun. 26, 2020, titled “Compositions and Methods for Treating Cancer”. The specification and claims thereof are incorporated herein by reference.

### SEQUENCE LISTING

[0002] The instant application contains a Sequence Listing which has been submitted electronically in XML format and is hereby incorporated by reference in its entirety. Said XML copy, created on Jul. 1, 2025, is named Replacement_Compositions and Methods for Treating Cancer_Con.xml and is 2.12 MB in size.

### BACKGROUND

[0003] A variety of cancer therapies and treatments exist such as surgical resection of solid tumors, radiation, and chemotherapy. While surgical resection and radiation are used on localized tumors, chemotherapy is often delivered systemically and impacts both cancer and non-cancer cells, leading to severe and even life-threatening side effects. Older cancer drugs, including alkylators, nucleotide antimetabolites, and tubulin poisons, cause significant side effects because they are similarly toxic to normal cells as to cancer cells, especially those normal cells undergoing routine cell division in the intestine, scalp, and skin. For this reason, much of the effort in contemporary cancer drug discovery is devoted to finding targeted therapeutics which differentiate between cancer cells and normal cells (Neidle et al., (2014) Cancer Drug Design and Discovery). This has led to drugs which inhibit the function of oncolytic proteins that are mutated, overexpressed, or abnormally hyperactive in cancer but not in normal cells. Examples of such drugs include kinase inhibitors, histone deacetylase inhibitors, proteasome inhibitors, mTOR inhibitors, BCL2 inhibitors, and isocitrate dehydrogenase inhibitors. Significant effort has also been devoted to targeting cell surface antigens which are differentially expressed in cancer cells compared to normal cells. Monoclonal antibodies and antibody-drug conjugates targeting cancer cell surface antigens have thus been developed as cancer therapeutics (Beck et al., (2017) Nat Rev Drug Disc 16, 315-337). Another point of differentiation between cancer cells and normal cells is metabolism. It was discovered many years ago that many cancer cells utilize glucose fermentation to generate ATP as opposed to the process of oxidative phosphorylation used by normal cells. A drug targeting isocitrate dehydrogenase, involved in abnormal glucose metabolism in cancer cells, was recently approved by the FDA (Dhillon (2018) Drugs 78, 1509-1516). Abnormalities in one-carbon metabolism, which encompasses the folate and methionine cycles and affects nucleotide synthesis and DNA methylation as a way of controlling gene expression, are strongly associated with some cancers (Fanidi et al., (2019) Int J Cancer 145, 1499-1503; Yang (2018) Front Oncol 8, 493). In this connection, it has been known for a long time that certain synthetic analogs of folic acid (antifolates) can inhibit the growth of cancer cells. It is also known that some cancer cells are dependent for survival on the amino acid methionine. If methionine is restricted, the cancer cells die, while this has little effect on normal cells. In recent years, evidence has begun to emerge that some cancer cells might have an abnormal dependency on vitamin B12. The nature of this dependency is not understood but might, in part, involve the use of vitamin B12 as a catalytic cofactor by the enzyme methionine synthase in one-carbon metabolism.

[0004] Vitamin B12 (cobalamin) is an essential micronutrient in the human diet. It is a cofactor for the metabolic enzymes methionine synthase and methylmalonyl-CoA mutase (Fedosov et al., (2012) Water Soluble Vitamins (book) 56, 347-367). After oral ingestion and transport through the intestine, cobalamin is almost completely protein bound in plasma to the chaperone proteins transcobalamin 1 (TCN1, haptocorrin, R-binder) (TCO1_HUMAN) and transcobalamin 2 (TCN2) (TCO2_HUMAN). The TCN2-cobalamin complex (TCN2-Cbl) is taken up by most cells using the process of receptor-mediated endocytosis and has a plasma half-life of 1-15 h. TCN2 has a high affinity and specificity for cobalamin in its various dietary and nutritional supplement forms, such as methyl cobalamin, adenosyl cobalamin and cyanocobalamin (Fedosov et al., (2007) Biochem 46, 6446-6458). TCN1 is a glycoprotein that exists in two different forms in plasma (Marzolo and Farfan (2011) Biol Res 44, 81-105). The most abundant form is sialylated and has a plasma half-life of about 10 days (Bor (2004) Clin Chem 50, 1043-1049). A less abundant form is desialylated and has a plasma half-life of a few minutes. Unlike TCN2-Cbl, which can be taken up by almost all cell types, the transcobalamin 1-cobalamin complex (TCN1-Cbl) is quickly taken up by certain liver cells, only in its desialylated form, by receptor-mediated endocytosis.

[0005] CD320 and LRP2 are two receptors involved in the uptake of cobalamin as TCN2-Cbl. CD320, a member of the low-density lipoprotein receptor (LDLR) family, is constitutively expressed in most cells and is the receptor primarily responsible for the uptake of cobalamin (Quadros (2013) Biochimie 95, 1008-1018). CD320 is overexpressed in some types of cancer (Sycel et al., (2013) Anticancer Res 33, 4203-4212; Amagasaki (1990) Blood 76, 1380-1386). There is also evidence that CD320 facilitates the transport of TCN2-Cbl through the blood-brain barrier into the brain (Lai et al.; (2013) FASEB 27, 2468-2475). LRP2 is another receptor in the LDLR family. It is expressed most highly in the kidney but also in other tissues. In addition to cobalamin, LRP2 also transports sundry proteins and small molecules, including albumin, insulin and vitamin D (Mazolo et al., (2011) Biol Res 44, 89-105). In the liver, the asialoglycoprotein receptor (ASGR) uptakes TCN1-Cbl by receptor-mediated endocytosis so long as TCN1 is in its desialylated form. Normal liver cells and liver cancer cells express very high levels of ASGR (˜50,000 receptors per cell), making this receptor attractive as a portal for delivering drugs to the liver (Luo et al., (2017) Biomedicine and Pharmacotherapy 88, 87-94; Stockert (1995) Physiological Rev 75, 595-609; Soda et al., Blood (1985) 65, 795-802).

[0006] After receptor mediated endocytosis, cobalamin is sequestered in the endosome, where the endosomal membrane prevents passive egress to the cytosol. A specialized protein (cbIF) facilitates the transport of cobalamin through the endosomal membrane to the cytosol (Banerjee et al., (2009) Curr Opin Chem Bio 13, 484-491).

### BRIEF SUMMARY OF THE INVENTION

[0007] One embodiment of the present invention provides for a double stranded RNA interference (RNAi) agent comprising at least one of (i) a first double-stranded ribonucleic acid (dsRNA) for inhibiting the expression of a CD320 gene wherein the first dsRNA comprises a sense strand and an antisense strand forming a duplex, (ii) a second dsRNA for inhibiting the expression of a LRP2 gene wherein the second dsRNA comprises a sense strand and an antisense strand forming a duplex, or (iii) a cocktail of (i) and (ii) and wherein the sense strand of the first dsRNA is at least substantially complementary to the antisense strand of the first dsRNA and the sense strand of the second dsRNA is at least substantially complementary to the antisense strand of the second dsRNA. For example, the antisense strand of (i) the first dsRNA includes a region of complementarity to a CD320 RNA transcript and for example the sense strand of (i) the first dsRNA is selected from Table 5. The antisense strand of (ii) the second dsRNA includes a region of complementarity to an LRP2 RNA transcript and the sense strand of (ii) the second dsRNA are selected from Table 6. In one example, (i) the first dsRNA or (ii) the second dsRNA comprises a duplex region which is 16-30 nucleotide pairs in length. In another example, (i) the first dsRNA or (ii) the second dsRNA comprises a duplex region which is 21-23 nucleotide pairs in length. In one embodiment, the double stranded RNAi agent includes at least one strand of: (i) the first dsRNA or (ii) the second dsRNA which comprises a 3′ overhang of at least 2 nucleotides. Further still, in one embodiment, the antisense strand of (i) the first dsRNA, comprises the nucleotide sequence selected from (5′→3′):

```
  (SEQ ID NO: 17)
CAGUUGCGCAGUUUCUUGUCAGUUCdTdT;
  (SEQ ID NO 18)
CAGUUGCGCAGUUUCUUGUCAGUUCdT*dT;
  (SEQ ID NO 19)
mCmAmGmUmUmGmCmGmCmAmGmUmUmUmCmUmUmGmUmCmAmGmUmUmCdT*dT;
  (SEQ ID NO 21)
mCmAmGmUmUmGmCmGmCmAmGmUmUmUmCmUmUmGmUmCmAmGmUmUmC;
  (SEQ ID NO 23)
mCmAmGmUmUmGmCmGmCmAmGmUmUmUmCmUmUmGmUmCmAmGmUmUmCdT*dT;
  (SEQ ID NO 24)
mC2fAmG2fUmU2fGmC2fGmC2fAmG2fUmU2fUmC2fUmU2fGmU2fCmA2fGmU2fUmCdT*dT;
  (SEQ ID NO 25)
mC2fAmG2fUmU2fGmC2fGmC2fAmG2fUmU2fUmC2fUmU2fGmU2fCmA2fGmU2fUmC;
  (SEQ ID NO 28)
2fCmA2fGmU2fUmG2fCmG2fCmA2fGmU2fUmU2fCmU2fUmG2fUmC2fAmG2fUmU2fCdT*dT;
  (SEQ ID NO 29)
2fCmA2fGmU2fUmG2fCmG2fCmA2fGmU2fUmU2fCmU2fUmG2fUmC2fAmG2fUmU2fC;
  (SEQ ID NO 30)
mC2fA2fG2fU2fU2fG2fC2fG2fC2fA2fG2fU2fU2fU2fC2fU2fU2fG2fU2fC2fA2fG2fU2fU
2fCdT*dT;
  (SEQ ID NO 32)
mC2fAmG2fUmU2fGmC2fGmC2fAmG2fUmU2fUmC2fUmU2fGmU2fCmA2fGmU2fUmCdT*dT;
  (SEQ ID NO 33)
mC2fAmG2fUmU2fGmC2fGmC2fAmG2fUmU2fUmC2fUmU2fGmU2fCmA2fGmU;
  (SEQ ID NO 34)
mC2fAmG2fUmU2fGmC2fGmC2fAmG2fUmU2fUmC2fU2fU2fG2fU2fC2fA2fG2fU;
wherein, mA, mC, mG, and mU are 2′-O-methyl adenosine, cytidine,
guanosine, or uridine, respectively; 2fA, 2fC, 2fG, and 2fU are 2′-fluoro
adenosine, cytidine, guanosine, or uridine, respectively; and * is a
phosphorothioate linkage; and the sense strand is at least substantially
complementary to the antisense strand.
```

[0008] Further still, in another embodiment, the double stranded RNAi agent includes the antisense strand of (i) the first dsRNA, that comprises the nucleotide sequence selected from (5′→3′)

```
  (SEQ ID NO 64)
AAGAGCUCAGGUCUCUGAGGGdTdT;
  (SEQ ID NO 65)
AAGAGCUCAGGUCUCUGAGGGdT*dT;
  (SEQ ID NO 66)
mAmAmGmAmGmCmUmCmAmGmGmUmCmUmCmUmGmAmGmGmGdT*dT;
  (SEQ ID NO 68)
mAmAmGmAmGmCmUmCmAmGmGmUmCmUmCmUmGmAmGmGmG;
  (SEQ ID NO 71)
mA2fAmG2fAmG2fCmU2fCmA2fGmG2fUmC2fUmC2fUmG2fAmG2fGmGdT*dT;
  (SEQ ID NO 72)
mA2fAmG2fAmG2fCmU2fCmA2fGmG2fUmC2fUmC2fUmG2fAmG2fGmG;
  (SEQ ID NO 75)
2fAmA2fGmA2fGmC2fUmC2fAmG2fGmU2fCmU2fCmU2fGmA2fGmG2fGdT*dT;
  (SEQ ID NO 76)
2fAmA2fGmA2fGmC2fUmC2fAmG2fGmU2fCmU2fCmU2fGmA2fGmG2fG;
  (SEQ ID NO 77)
mA2fA2fGmA2fGmC2fUmC2fAmG2fGmU2fCmU2fCmU2fGmA2fGmG2fG;
  (SEQ ID NO 78)
mA2fA2fGmA2fGmC2fUmC2fAmG2fGmU2fCmU2fCmU2fGmA2fGmG2fGdT*dT;
  (SEQ ID NO 79)
2fAmA2fGmA2fGmC2fUmC2fAmG2fGmU2fCmU2fCmU2fGmA2fGmG2fGdT*dT;
  (SEQ ID NO 81)
2fAmA2fGmA2fGmC2fUmC2fAmG2fGmU2fCmU2fC2fU2fG2fA2fG2fG2fG;
wherein, mA, mC, mG, and mU are 2′-O-methyl adenosine, cytidine,
guanosine, or uridine, respectively; 2fA, 2fC, 2fG, and 2fU are
2′-fluoro adenosine, cytidine, guanosine, or uridine, respectively;
and * is a phosphorothioate linkage; and the sense strand is
at least substantially complementary to the antisense strand.
```

[0009] In another embodiment the double stranded RNAI agent of (i) the second deRNA comprises the nucleotide sequence selected from (5′→3)

```
  (SEQ ID NO: 417)
UUUGAUAGCACCAAACCUAGAGCCCdTdT;
  (SEQ ID NO: 418)
UUUGAUAGCACCAAACCUAGAGCCCdT*dT;
  (SEQ ID NO: 419)
mUm[mUmGmAmUmAmGmCmAmCmCmAmAmAmCmCmUmAmGmAmGmCmCmCdT*dT;
  (SEQ ID NO: 421)
mUmUmUmGmAmUmAmGmCmAmCmCmAmAmAmCmCmUmAmGmAmGmCmCmC;
(SEQ ID NO: 424)
mU2fUmU2fGmA2fUmA2fGmC2fAmC2fCmA2fAmA2fCmC2fUmA2fGmA2fGmC2fCmCdT*dT];
  (SEQ ID NO: 425)
mU2fUmU2fGmA2fUmA2fGmC2fAmC2fCmA2fAmA2fCmC2fUmA2fGmA2fGmC2fCmC;
  (SEQ ID NO: 429)
mU2fAmU2fCmA2fAmA2fCmC2fUmC2fGmA2fUmA2fGmC2fAmA2fCmA2fCmC2fGmC;
  (SEQ ID NO: 430)
mU2fU2fU2fG2fA2fU2fA2fG2fC2fA2fC2fC2fA2fA2fA2fC2fC2fU2fA2fG2fA2fG2fC2fC2fCdT*dT;
  (SEQ ID NO: 432)
mU2fUmU2fGmA2fUmA2fGmC2fAmC2fCmA2fAmA2fCmC2fUmA2fGmA2fGmC2fCmCdT*dT;
  (SEQ ID NO: 433)
mU2fUmU2fGmA2fUmA2fGmC2fAmC2fCmA2fAmA2fCmC2fUmA2fGmA2fGmC;
and
  (SEQ ID NO: 434)
mU2fUmU2fGmA2fUmA2fGmC2fAmC2fCmA2fAmA2fC2fC2fU2fA2fG2fA2fG2fC
wherein, mA, mC, mG, and mU are 2′-O-methyl adenosine, cytidine,
guanosine, or uridine, respectively; 2fA, 2fC, 2fG, and 2fU are
2′-fluoro adenosine, cytidine, guanosine, or uridine, respectively;
and * is a phosphorothioate linkage; and the sense strand is at
least substantially complementary to the antisense strand.
```

[0010] In a further embodiment, the double stranded RNAI agent antisense strand of (i) the second deRNA comprises the nucleotide sequence selected from (5′→3)

```
(SEQ ID NO: 448)
UUUGCAAUGACUCUCCUAUCAGUCCdTdT;
  (SEQ ID NO: 449)
UUUGCAAUGACUCUCCUAUCAGUCCdT*dT;
(SEQ ID NO: 450)
mUmUmUmGmCmAmAmUmGmAmCmUmCmUmCmCmUmAmUmCmAmGmUmCmCdT*dT;
(SEQ ID NO: 452)
mUmUmUmGmCmAmAmUmGmAmCmUmCmUmCmCmUmAmUmCmAmGmUmCmC;
(SEQ ID NO: 455)
mU2fUmU2fGmC2fAmA2fUmG2fAmC2fUmC2fUmC2fCmU2fAmU2fCmA2fGmU2fCmCdT*dT;
(SEQ ID NO: 456)
mU2fUmU2fGmC2fAmA2fUmG2fAmC2fUmC2fUmC2fCmU2fAmU2fCmA2fGmU2fCmC;
  (SEQ ID NO: 458)
mU2fUmU2fGmC2fAmA2fUmG2fAmC2fUmC2fUmC2fCmU2fAmU2fCmA2fCmU2fCmC;
(SEQ ID NO: 459)
2fUmU2fUmG2fCmA2fAmU2fGmA2fCmU2fCmU2fCmC2fUmA2fUmC2fAmG2fUmC2fCdT*dT;
(SEQ ID NO: 460)
mU2fAmU2fCmC2fUmA2fAmG2fUmC2fAmC2fAmC2fGmU2fUmU2fGmA2fCmU2fGmC;
(SEQ ID NO: 461)
mU2fU2fU2fG2fC2fA2fA2fU2fG2fA2fC2fU2fC2fU2fC2fC2fU2fA2fU2fC2fA2fG2fU2fC2fCdT*dT ;
  (SEQ ID NO: 463)
mU2fUmU2fGmC2fAmA2fUmG2fAmC2fUmC2fUmC2fCmU2fAmU2fCmA2fGmU2fCmCdT*dT;
  (SEQ ID NO: 464)
mU2fUmU2fGmC2fAmA2fUmG2fAmC2fUmC2fUmC2fCmU2fAmU2fCmA2fGmU;
  (SEQ ID NO: 465)
mU2fUmU2fGmC2fAmA2fUmG2fAmC2fUmC2fUmC2fC2fU2fA2fU2fC2fA2fG2fU
wherein, mA, mC, mG, and mU are 2′-O-methyl adenosine, cytidine, guanosine,
or uridine, respectively; 2fA, 2fC, 2fG, and 2fU are 2′-fluoro adenosine,
cytidine, guanosine, or uridine, respectively; and * is a phosphorothioate
linkage; and the sense strand is at least substantially complementary to the
antisense strand.
```

[0011] For example, when the RNAi agent comprises (iii) the combination of (i) the first dsRNA and (ii) the second dsRNA, the antisense strand of (i) the first dsRNA is selected from

(SEQ ID NO: 17)
CAGUUGCGCAGUUUCUUGUCAGUUCdTdT;
(SEQ ID NO 18)
CAGUUGCGCAGUUUCUUGUCAGUUCdT*dT
(SEQ ID NO 64)
AAGAGCUCAGGUCUCUGAGGGdTdT;
and
(SEQ ID NO 65)
AAGAGCUCAGGUCUCUGAGGGdT*dT;
and
the antisense strand of (ii) the second dsRNA is
selected from
(SEQ ID NO: 417)
UUUGAUAGCACCAAACCUAGAGCCCdTdT;
(SEQ ID NO: 418)
UUUGAUAGCACCAAACCUAGAGCCCdT*dT;
(SEQ ID NO: 448)
UUUGCAAUGACUCUCCUAUCAGUCCdTdT;
and
(SEQ ID NO: 449)
UUUGCAAUGACUCUCCUAUCAGUCCdT*dT;
wherein * is a phosphorothioate linkage; and
the sense strand is at least substantially
complementary to the antisense strand.

[0012] In one embodiment, (i) the first dsRNA has the duplex structure of (SEQ ID NOS: 17 and 110) or (SEQ ID NOs: 18 and 111). In another (ii) the second dsRNA has the duplex structure of (SEQ ID NOs: 417 and 808) or (SEQ ID NOs: 448 and 822).

[0013] Another embodiment provides for an isolated cell comprising a double stranded RNAi gent of (i), (ii) or (iii).

[0014] For example, the sense strand of (i) the first dsRNA is no more than 30 nucleotides in length, and the antisense strand of (i) the first dsRNA is no more than 30 nucleotides in length. For example, the sense strand of (ii) the second dsRNA is no more than 30 nucleotides in length, and the antisense strand is no more than 30 nucleotides in length.

[0015] Yet another embodiment provides a pharmaceutical composition for inhibiting expression of a CD320 gene, the pharmaceutical composition comprising a double stranded RNAi agent (i) or (iii). Further the pharmaceutical composition may include an excipient.

[0016] Yet another embodiment provides a pharmaceutical composition for inhibiting expression of an LRP2 gene, the composition comprising a double stranded RNAi agent (ii) or (iii). Further the pharmaceutical composition may include an excipient.

[0017] Another embodiment of the present invention provides a method for inhibiting proliferation of a cancer cell (CC) comprising contacting of the CC with an inhibitor of CD320 add/or LRP2 in an amount effective to inhibit proliferation of the CC. For example, the CC may express CD320 and/or LRP2 or both.

[0018] Another embodiment of the present invention provides a method for treating a therapeutically-resistant cancer in a subject who has previously received a therapy, comprising administering to the subject an inhibitor of CD320 add/or LRP2 in an amount effective to inhibit or kill cancer cells (CCs) present in the therapeutically-resistant cancer.

[0019] Another embodiment of the present invention provides a method for treating cancer in a subject who has recurring or relapsed cancer comprising administering to a subject an inhibitor of CD320 add/or LRP2 in an amount effective to inhibit or kill CCs in the cancer.

[0020] The CC is from a cancer selected from melanoma, glioblastoma, lung carcinoma, breast carcinoma, triple negative breast carcinoma, hepatocellular carcinoma, renal carcinoma, pancreatic carcinoma, ovarian carcinoma and prostate carcinoma.

[0021] The CD320 inhibitor is selected from an antibody that binds CD320, a small molecule inhibitor of CD320, and a RNAi agent that hybridizes to a nucleic acid sequence encoding CD320.

[0022] Further, the method of inhibiting proliferation of a CC, treating a therapeutically resistive cancer in a subject or has a recurring or relapsed cancer comprises administering a cancer therapeutic in combination with an RNAi agent that hybridizes to an mRNA encoding for CD320 or an RNAi agent that hybridizes to an mRNA encoding for LRP2. For example, the cancer therapeutic is selected from the antifolate class, epigenetic modulatory class, or a small molecule or protein inhibitor of CD320 function or LRP2 function, such as an antibody for CD320 or an antibody for LRP2. Further still, the method further comprises administering metformin. For example, the RNAi agent comprises an antisense strand of Table 5 or of Table 6.

[0023] The inhibitor is selected from the group consisting of an antibody that binds LRP2, a small molecule inhibitor of LRP2, and an RNAi agent that hybridizes to a nucleic acid sequence encoding LRP2. For example, the method further comprises administering a cancer therapeutic selected from the antifolate class, epigenetic modulatory class, or the small molecule or protein inhibitor of LRP2 function, such as an antibody, in combination with an RNAi agent that hybridizes to an mRNA encoding for LRP2.

[0024] The method further comprises administering a cancer therapeutic in combination with an RNAi agent that hybridizes to an mRNA encoding for LRP2.

[0025] One embodiment of the present invention provides for a method for inhibiting proliferation of a cancer cell (CC) comprising contacting of a CC with a composition comprising an inhibitor of CD320 and an inhibitor of LRP2 in an amount effective to inhibit proliferation of the CC. For example, the composition is a cocktail comprising i) the CD320 inhibitor selected from an antibody that binds CD320, a small molecule inhibitor of CD320, and a RNAi agent that hybridizes to a nucleic acid encoding CD320 and any combination thereof, and ii) the LRP2 inhibitor selected from an antibody that binds LRP2, a small molecule inhibitor of LRP2, and a RNAi agent that hybridizes to a nucleic acid sequence encoding LRP2 and any combination thereof. Further, the method further comprises administering a cancer therapeutic selected from the antifolate class and epigenetic modulatory class. For example, the RNAi agent that hybridizes to the mRNA encoding for CD320 comprises a first double-stranded ribonucleic acid (dsRNA) for inhibiting expression of CD320, wherein the first dsRNA comprises a sense strand and an antisense strand, the antisense strand comprising a region of complementarity to a CD320 RNA transcript and the RNAi agent that hybridizes to the mRNA encoding for LRP2 comprises a second dsRNA for inhibiting expression of LRP2, wherein the second dsRNA comprises a sense strand and an antisense strand, the antisense strand comprising a region of complementarity to an LRP2 RNA transcript. In a further example, the antisense strand that is complementary to CD320 RNA transcript is selected from Table 5 and the antisense strand that is complementary to the RNA transcript for LRP2 is selected from Table 6. The method further comprises administering a cancer therapeutic selected from the antifolate class and epigenetic modulatory class. The method further comprises administering a cancer therapeutic selected from the immunomodulatory class. Further still, the method further comprises administering metformin.

[0026] One aspect of one embodiment of the present invention provides a method for the inhibition of CD320 and LRP2 protein expression, such that the levels of these proteins are reduced in treated cells compared to their endogenous levels in untreated cells; this inhibition may also be referred to as the knockdown of CD320 and LRP2 expression. The method entails the use of a cocktail of small interfering RNA molecules, otherwise known as siRNAs, which guide the mRNA sequences encoding for either CD320 or LRP2 into an enzymatic complex which leads to targeted destruction of these mRNAs.

[0027] Another aspect of the present invention provides a method for the individual or concurrent inhibition of LRP2 and CD320 protein expression, which inhibits the growth of many cancer cells as compared to non-cancer (normal) cells. In some instances, CD320 or LRP2 protein knockdown alone is sufficient to severely inhibit cancer cell proliferation compared to normal cells.

[0028] Another aspect of the present invention provides for inhibition of cancer cell proliferation by inhibiting LRP2 receptor expression.

[0029] Mechanistic investigations into the selectivity of porphyrin uptake by cancer cells led to several nonobvious compounds and methods of using the compound(s). It was discovered that the knockdown of the expression of either CD320 gene or LRP2 gene or the simultaneous knockdown of the expression of CD320 gene and LRP2 gene caused cell death or inhibition of cell growth in a panel of lung cancer cell lines, compared to normal fibroblasts. The experimental outline is illustrated in FIG. 1. In these experiments, cells were plated on day 0. The next day (day 1), virus particles encoding short hairpin RNAs (shRNAs) directed to the CD320 gene and the LRP2 gene or an irrelevant shRNA control were added to the cell culture together with protamine sulfate, a reagent that facilitates cell entry of the virus particles.

[0030] Further investigations revealed that knockdown of the expression of either the CD320 gene or LRP2 gene or the simultaneous knockdown of the expression of CD320 and LRP2 genes using small interfering RNAs (siRNAs) caused cell death or inhibition of cell growth in a panel of cancer cell lines that included lung cancer, prostate cancer, breast cancer, glioblastoma and melanoma, compared to normal fibroblasts (FIG. 9-10). It was also found that that knockdown of one gene, either CD320 or LRP2, led to increased expression of the other in some cancer cell lines.

[0031] One aspect of the present invention provides for the knockdown of the CD320 receptor, the LRP2 receptor or the simultaneous knockdown of both in vivo and in vitro cancer cells that express CD320 mRNA and/or LRP2 mRNA.

[0032] Another aspect of the present invention is a method to inhibit cell growth or cause cell death of cancer cells treated with a compound as described herein, while leaving normal cells unaffected or inhibiting cell growth to a lesser degree or producing less cell death as compared to a cancer cell treated with the same amount of the compound.

[0033] Another aspect of a first compound and method of use is a selective therapy which inhibits proliferation of cancer cells and/or kills cancer cells with an inhibition of LRP2 Receptor while leaving normal cells unharmed.

[0034] Another aspect of a second compound and method of use is a selective therapy which inhibits proliferation of cancer cells and/or kills cancer cells with an inhibition of CD320 Receptor while leaving normal cells unharmed.

[0035] Another aspect of the present invention provides for treating a cancer by administering a therapy to selectively inhibit proliferation of a cancer cell(s) and/or kill a cancer cell(s) with one or more of the following, a first compound that is an inhibitor of CD320 receptor, a second compound that is an inhibitor of LRP2 receptor or a combination thereof.

### DESCRIPTION OF THE SEVERAL VIEWS OF THE DRAWINGS

[0036] The accompanying drawings, which are incorporated into and form a part of the specification, illustrate one or more embodiments of the present invention and, together with the description, serve to explain the principles of the invention. The drawings are only for the purpose of illustrating one or more embodiments of the invention and are not to be construed as limiting the invention. In the drawings:

[0037] FIG. 1 illustrates an experimental design for knocking down CD320 and LRP2 in a cell. Cells were plated on day 0. The next day (day 1), virus particles encoding short hairpin RNAs (shRNAs) directed at the CD320 and LRP2 mRNA or a non-targeting shRNA control were added to the cell culture together with protamine sulfate, a reagent that facilitates cell entry of the virus particles. Table 1 shows the sequences that were used. Each shRNA coding sequence was also combined with a unique drug resistance gene, which would allow for selecting those cells that had taken up the shRNA; cells that had not taken up the shRNA would not survive. On day 2, drug selection was started. On day 3, the cells were harvested and plated in a new dish. Only the cells with a drug resistance gene, i.e., those cells that had taken up shRNA virus particles would survive this re-plating procedure. From day 4 on, each culture was closely observed for cell growth. Cells infected with the non-targeting negative control shRNA continued growing-data not shown. The results for the cell lines that expressed the CD320+LRP2 shRNAs are shown in Table 1.

[0038] FIGS. 2A-C illustrate sensitivity of cancer cell lines to knockdown of CD320 and LRP2. Normal cells (GM05659 fibroblasts) or cancer cells were infected with lentiviruses expressing shRNAs to control sequences or to shCD320 and shLRP2 as described in FIG. 1. The cells were grown as described in FIG. 1. On the ninth day after transfection with the lentiviruses, pictures of the cells were taken. The solid oval indicates healthy growth of normal fibroblast infected with shRNAs to CD320 and LRP2. The broken line ovals indicate unhealthy dying cancer cells infected with shRNAs targeting CD320 and LRP2 (FIG. 2A). The fields of cells in FIG. 2A were counted and quantified and illustrated in FIG. 2B. The data in FIG. 2B were normalized to the number of control cells and illustrated in FIG. 2C. FIG. 2C. shows that the cultures of cells infected with lentivirus encoding the shRNAs against CD320 and LRP2 (white bars) contain far fewer cells than the cultures of cells exposed to the shRNA control (black bar).

[0039] FIGS. 3A-F illustrate graphs of protein levels resulting from transfection of HEK293, MDA-MB-435S and MDA-MB-231 cells with siRNA to LRP2 and CD320. HEK293, MDA-MB-435S and MDA-MB-231 cells were transfected with 20 nM of indicated siRNAs and incubated for 48 hours. siRNAs targeting CD320 are designated OSC17 and OSC47. siRNAs targeting LRP2 are designated OSL245, OSL47, OSL104, OSL90 and OSL119. Whole cell lysates were prepared and immunoblotted for CD320 and LRP2 protein levels. The protein levels were normalized to a housekeeping control gene unaffected by the siRNA transfection. The graphs FIG. 3A-F represent the fold change of protein levels compared to siScramble (OSS1 or OSS2). (Average+/−SEM is shown, n=3).

[0040] FIGS. 4A-F illustrate a graph of cells after transfection of LnCAP, MCF-7 and U251 cells with siRNA to LRP2 and CD320. LnCAP, MCF-7 and U251 cells were transfected with 20 nM of indicated siRNAs and incubated for 48 hours. siRNAs targeting CD320 are designated OSC17 and OSC47. SiRNAs targeting LRP2 are designated OSL245, OSL47, OSL104, OSL90 and OSL119). Whole cell lysates were prepared and immunoblotted for CD320 and LRP2 protein levels. The protein levels were normalized to a housekeeping control gene unaffected by the siRNA transfection. The graphs FIG. 4A-F represent the fold change of protein levels compared to siScramble (OSS2).

[0041] FIGS. 5A-C illustrate graphs of protein levels after transfection of A172, DU145 and GM05659 cells with siRNA to LRP2 and CD320. A172, DU145 and GM05659 cells were transfected with 20 nM of indicated siRNAs and incubated for 48 hours. siRNAs targeting CD320 are designated OSC17 and OSC47. siRNAs targeting LRP2 are designated OSL245, OSL47, OSL104, OSL90 and OSL119). Whole cell lysates were prepared and immunoblotted for CD320. The protein levels were normalized to a housekeeping control gene unaffected by the siRNA transfection. The graphs FIG. 5A-C represent the fold change of protein levels compared to siScramble (OSS2).

[0042] FIG. 6 illustrates a graph of relative LRP2 protein expression in various cell lines-Lysates were made from the cell lines indicated on the x-axis, and western blot was performed to determine LRP2 protein levels. The results represent the averages+/−SEM of three independent lysates.

[0043] FIGS. 7A-B illustrates graphs of the effect of doxorubicin treatment on cell viability, as measured by the CTG assay. A172 and HCC15 cells were plated at 1200 cells/well in a 96 well plate. The next day, cells were treated with doxorubicin at the indicated concentrations. Four days after doxorubicin treatment was initiated, the cells were assayed for viability using the CTG assay. The dashed line indicates the non-linear fitting of the data to calculate an IC₅₀ value.

[0044] FIG. 8 is a schematic overview of the functional assay for screening siRNA effects on cell proliferation to facilitate quantification of the effects of knocking down CD320 and LRP2 on cell proliferation. Cells were plated in a 24-well plate. The next day, the cells were transfected with siRNAs targeting CD320 (OSC17, OSC47) and/or targeting LRP2 (OSL231, OSL245), or a control siRNA (OSS2). The cell lines may require repeated transfections and/or time for efficient toxicity (cell line dependent). In this experimental set-up there is room for repeat infection should some cell lines require that for efficient toxicity. In addition, in a small subset of the wells, cells were only treated with doxorubicin as a positive control for toxicity. At the end of the study, the cell lines are analyzed for cell growth by the CTG assay.

[0045] FIGS. 9A-E illustrate graphs of the percent cell survival of siCD320 and siLRP2 on cell proliferation-Cell lines representative of several types of cancers (lung, brain) or normal fibroblasts were transfected with individual or combinations of siRNAs targeting CD320 (OSC17, OSC47) or LRP2 (OSL231, OSL245), individually at 20 nM or in combination (10 nM each), or a negative control siRNA (OSS2) (20 nM) as indicated. Cells were repeatedly transfected as outlined in Table 9 for efficient toxicity, then assayed for viability by the CTG assay. Doxorubicin-treated cells served as a positive control for cell toxicity in our assays (Table 8).

[0046] FIGS. 10A-E illustrate graphs of the effects of siCD320 and siLRP2 on cell proliferation-Cell lines representative of several types of cancers (breast, prostate, skin) were transfected with individual or combinations of siRNAs targeting CD320 (OSC17, OSC47) or LRP2 (OSL231, OSL245) as indicated. Cells were repeatedly transfected as outlined in Table 9 for efficient toxicity, then assayed for viability by the CTG assay. Doxorubicin-treated cells served as a positive control for cell toxicity in our assays (Table 8).

[0047] FIGS. 11A-B illustrate the effects of siCD320 and siLRP2 molar proportions on cell proliferation with different molar proportions of siRNA targeting CD320 and siRNA targeting LRP2. Cell lines representative of two types of cancers (breast, prostate) were transfected with different proportions of siRNAs targeting CD320 (OSC17) or LRP2 (OSL245) (0-20 nM) or a negative control siRNA (OSS2) as indicated. Cells were repeatedly transfected for efficient toxicity then assayed for viability by the CTG assay. Doxorubicin-treated cells served as a positive control for cell toxicity in our assays (Table 8).

[0048] FIGS. 12A-B illustrate graphs of the duration of the knockdown effect for siCD320 and siLRP2 on MDA-MD-231 cells. A representative breast cancer cell line (MDA-MD-231) was transfected on Day 0 with 20 nM of an siRNA targeting CD320 (OSC17) or an siRNA targeting LRP2 (OSL245) or a negative control siRNA (OSS2) and the percentage of protein knockdown was analyzed daily over a period of five days by western blot. Protein levels were normalized to the negative control (OSS2).

[0049] FIG. 13 is a schematic of polyethylenimine (PEI) and siRNA complexation. PEI and siRNAs are mixed together. Subsequently, polyplexes (a nanoparticle, broadly speaking) of the PEI-siRNA complex form, which are able to enter the cell.

[0050] FIG. 14 is a schematic that illustrates that siRNAs are short RNA duplexes of generally 16 to 30 nucleotides; the guide sequence of the siRNA is complementary to a mRNA expressed in the cell. Exogenous siRNA duplexes are introduced into the cell via a method of transfection. The siRNA duplexes are separated via the RISC/AGO (RNA-induced silencing complex) complex, whereby the guide strand of the siRNA hybridizes with its complementary mRNA molecule. The mRNA is degraded by the RISC/AGO complex, which has RNAse activity, resulting in mRNA degradation, and the protein encoded by the mRNA is not produced. This causes the “knockdown” effect or reduced protein levels of the gene targeted by the siRNA compared to control treated cells.

[0051] FIGS. 15A-B illustrate graphs of A172 cell line or MDA-MD-435S cell lines treated with control siRNA (OSS1, OSS2) and siRNA directed to CD320 mRNA (OSC17, OSC47) and siRNA directed to LRP2 mRNA (OSL231, OSL245) to determine the effectiveness of INTERFERin, a polyethanolamine transfection reagent, in delivering siRNAs to cancer cells.

[0052] FIGS. 16A-D illustrate plated cells showing the effects of siCD320 and siLRP2 on four cell lines. Cell lines representative of four types of cancers (breast, two prostate, skin) were transfected with siRNAs targeting CD320 (OSC17) or LRP2 (OSL245) individually at 20 nM or in combination (10 nM each) or a negative control siRNA (OSS2) (20 nM) as indicated. Cells were repeatedly transfected for efficient toxicity as in Table 9 and then analyzed by microscopy as indicated.

[0053] FIG. 17 illustrates a graphical depiction of CD320 mRNA. UTR references the untranslated region, and the CDS references the protein coding sequence.

[0054] FIG. 18 illustrates a graphical depiction of LRP2 mRNA UTR references the untranslated region, and the CDS references the protein coding sequence.

[0055] FIGS. 19A-G illustrates the structures for unnatural nucleotides which may be incorporated within the sequence of an RNAi. “B” represents a natural (G, C, A, U) RNA nucleobase, a DNA nucleobase, or an unnatural nucleobase. FIG. 19A shows certain chemical modifications to the ribose 2′-position and phosphate moieties. FIG. 19B-D shows skeletal modifications to the ribose moiety that comprise bridging groups. FIG. 19E shows a deletion of the C2′-C3′ bond. FIG. 19F-G shows other skeletal modifications to the ribose moiety wherein a six-membered ring replaces the five-membered ring.

[0056] FIG. 20 illustrates a schematic for the in vivo murine xenograft model for breast cancer. MDA-MB-231 cells were implanted into the flank of NSG mice and grown to a volume of 70 mm³ after which siRNAs targeting CD320 (OSC17) and LRP2 (OSL245) were injected intratumorally once every fourth day.

### DETAILED DESCRIPTION OF THE INVENTION

[0057] One or more embodiment of the present invention provides methods and RNAi compounds for modulating the expression of a CD320 gene and/or an LRP2 gene in a cell. In certain embodiments, expression of a CD320 gene and/or a LRP2 gene is reduced or inhibited using an CD320 and/or LRP2 specific RNAi. Such inhibition can be useful in treating disorders such as cancer and/or creating cell lines that are useful for screening drugs that treat cancer

[0058] The present invention also relates to a method for knocking down (partially or completely) the targeted genes.

[0059] One embodiment of the method of producing knockdown cells and organisms comprises introducing into a cell or organism in which a gene (referred to as a targeted gene) to be knocked down, an siRNA of about 16 to about 30 nucleotides (nt) that targets the gene and maintaining the resulting cell or organism under conditions under which RNAi occurs, resulting in degradation of the mRNA of the targeted gene, thereby producing knockdown cells or organisms. Knockdown cells and organisms produced by the present method are also the subject of embodiment of the present invention.

[0060] An embodiment of the present invention also relates to a method of examining or assessing the function of a gene in a cell or organism. In one embodiment, RNA of about 16 to about 30 nt which targets mRNA of the gene for degradation is introduced into a cell or organism in which RNAi occurs. The cell or organism is referred to as a test cell or organism. The cell or organism is referred to as a test cell organism. The test cell or organism is maintained under conditions under which degradation of mRNA of the gene occurs. The phenotype of the test cell or organism is then observed and compared to that of an appropriate control cell or organism, such as a corresponding cell or organism that is treated in the same manner except that the gene is not targeted. A 16 to 30 nt RNA that does not target the mRNA for degradation can be introduced into the control cell or organism in place of the siRNA introduced into the test cell or organism, although it is not necessary to do so. A difference between the phenotypes of the test and control cells or organisms provides information about the function of the degraded mRNA.

[0061] The RNA of about 16 to about 30 nucleotides is isolated or synthesized and then introduced into a cell or organism in which RNAi occurs (test cell or test organism). The test cell or test organism is maintained under conditions under which degradation of the mRNA occurs. The phenotype of the test cell or organism is then observed and compared to that of an appropriate control, such as a corresponding cell or organism that is treated in the same manner as the test cell or organism except that the targeted gene is not targeted. A difference between the phenotypes of the test and control cells or organisms provides information about the function of the targeted gene. The information provided may be sufficient to identify (define) the function of the gene or may be used in conjunction with information obtained from other assays or analyses to do so.

[0062] An embodiment of the present invention also encompasses a method of treating a disease or condition associated with the presence of a protein in an individual, comprising administering to the individual RNA of from about 16 to about 30 nucleotides which targets the mRNA of the protein (the mRNA that encodes the protein) for degradation. As a result, the protein is not produced or is not produced to the extent it would be in the absence of the treatment.

[0063] FIG. 14 shows that siRNAs are short RNA duplexes of generally 16 to 30 nucleotides; the sequence of the siRNA is complementary to a mRNA expressed in the cell. Exogenous siRNA duplexes are introduced into the cell via a method of transfection. The siRNA duplexes are unwound via the RNA-induced silencing complex (RISC), whereby the guide strand of the siRNA hybridizes with its complementary mRNA molecule. The mRNA is degraded by the RISC/AGO complex, which has RNAse cleave activity. The end result is that the mRNA targeted by the siRNA is degraded, and the protein encoded by the mRNA is not produced. This causes the “knockdown” effect or reduced protein levels of the gene targeted by the siRNA compared to control treated cells.

[0064] In one embodiment, at least one strand of the RNA molecule has a 3′ overhang from about 1 to about 6 nucleotides (e.g., pyrimidine nucleotides, purine nucleotides) in length. In other embodiments, the 3′ overhang is from about 1 to about 5 nucleotides, from about 1 to about 3 nucleotides and from about 2 to about 4 nucleotides in length or, for example, the overhang can be up to 14 nucleotides if the guide strand were a 27-mer. In one embodiment the RNA molecule is double stranded, one strand has a 3′ overhang and the other strand can be blunt-ended or have an overhang. In the embodiment in which the RNA molecule is double stranded and both strands comprise an overhang, the length of the overhangs may be the same or different for each strand. In a particular embodiment, the RNA of the present invention comprises 21-27 nucleotide strands which are Watson-Crick paired and which have overhangs of from about 1 to about 3, particularly about 2, nucleotides on both 3′ ends of the RNA. In order to further enhance the stability of the RNA of the present invention, the 3′ overhangs can be stabilized against degradation. In one embodiment, the RNA is stabilized by including purine nucleotides, such as adenosine or guanosine nucleotides. Alternatively, substitution of pyrimidine nucleotides by unnatural nucleotides, e.g., substitution of uridine 2 nucleotide 3′ overhangs by 2′-deoxythymidine, is tolerated and does not affect the efficiency of RNAi. The absence of a 2′ hydroxyl significantly enhances the nuclease resistance of the overhang in tissue culture medium. The 3′-overhangs can be further stabilized by introduction of phosphorothioate groups in place of the phosphodiesters.

[0065] The 16-30 nt RNA molecules of the present invention can be obtained using a number of techniques known to those of skill in the art. For example, the RNA can be chemically synthesized or recombinantly produced using methods known in the art.

[0066] In order that the present invention may be more readily understood, certain terms are first defined. In addition, it should be noted that whenever a value or range of values of a parameter are recited, it is intended that values and ranges intermediate to the recited values are also intended to be part of this invention.

[0067] The articles “a” and “an” are used herein to refer to one or to more than one (i.e., to at least one) of the grammatical object of the article. By way of example, “an element” means one element or more than one element, e.g., a plurality of elements.

[0068] The term “including” is used herein to mean, and is used interchangeably with, the phrase “including but not limited to”.

[0069] The term “or” is used herein to mean, and is used interchangeably with, the term “and/or,” unless context clearly indicates otherwise.

[0070] As used herein, “CD320” refers to the gene or protein. CD320 is also known as 8D6 antigen, CD320 antigen, 8D6A, transcobalamin receptor, FDC-SM-8D6, FDC-Signaling Molecule 8D6, 8D6, TCBLR, TCbIR, TCN2R. The term CD320 includes human CD320, the amino acid and nucleotide sequence of which may be found in, for example, GenBank Accession No. NM_016579.4 and NM_001165895.2; mouse CD320, the amino acid and nucleotide sequence of which may be found in, for example, GenBank Accession No. NM_019421.3; rat CD320, the amino acid and nucleotide sequence of which may be found in, for example, GenBank Accession No. NM_001014201.1. Additional examples of CD320 mRNA sequences are readily available using, e.g., GenBank. Additional information is found at FIG. 17.

[0071] The CD320 DNA sequence from Homo sapiens is as follows: >NM_016579.4 Homo sapiens CD320 molecule (CD320), transcript variant 1, DNA

(SEQ ID NO. 935)
GTGCGCGTGCGCAGGGATAAGAGAGCGGTCTGGACAGCGCGTGGCCGGC
GCCGCTGTGGGGACAGCATGAGCGGCGGTTGGATGGCGCAGGTTGGAGC
GTGGCGAACAGGGGCTCTGGGCCTGGCGCTGCTGCTGCTGCTCGGCCTC
GGACTAGGCCTGGAGGCCGCCGCGAGCCCGCTTTCCACCCCGACCTCTG
CCCAGGCCGCAGGCCCCAGCTCAGGCTCGTGCCCACCCACCAAGTTCCA
GTGCCGCACCAGTGGCTTATGCGTGCCCCTCACCTGGCGCTGCGACAGG
GACTTGGACTGCAGCGATGGCAGCGATGAGGAGGAGTGCAGGATTGAGC
CATGTACCCAGAAAGGGCAATGCCCACCGCCCCCTGGCCTCCCCTGCCC
CTGCACCGGCGTCAGTGACTGCTCTGGGGGAACTGACAAGAAACTGCGC
AACTGCAGCCGCCTGGCCTGCCTAGCAGGCGAGCTCCGTTGCACGCTGA
GCGATGACTGCATTCCACTCACGTGGCGCTGCGACGGCCACCCAGACTG
TCCCGACTCCAGCGACGAGCTCGGCTGTGGAACCAATGAGATCCTCCCG
GAAGGGGATGCCACAACCATGGGGCCCCCTGTGACCCTGGAGAGTGTCA
CCTCTCTCAGGAATGCCACAACCATGGGGCCCCCTGTGACCCTGGAGAG
TGTCCCCTCTGTCGGGAATGCCACATCCTCCTCTGCCGGAGACCAGTCT
GGAAGCCCAACTGCCTATGGGGTTATTGCAGCTGCTGCGGTGCTCAGTG
CAAGCCTGGTCACCGCCACCCTCCTCCTTTTGTCCTGGCTCCGAGCCCA
GGAGCGCCTCCGCCCACTGGGGTTACTGGTGGCCATGAAGGAGTCCCTG
CTGCTGTCAGAACAGAAGACCTCGCTGCCCTGAGGACAAGCACTTGCCA
CCACCGTCACTCAGCCCTGGGCGTAGCCGGACAGGAGGAGAGCAGTGAT
GCGGATGGGTACCCGGGCACACCAGCCCTCAGAGACCTGAGCTCTTCTG
GCCACGTGGAACCTCGAACCCGAGCTCCTGCAGAAGTGGCCCTGGAGAT
TGAGGGTCCCTGGACACTCCCTATGGAGATCCGGGGAGCTAGGATGGGG
AACCTGCCACAGCCAGAACTGAGGGGCTGGCCCCAGGCAGCTCCCAGGG
GGTAGAACGGCCCTGTGCTTAAGACACTCCTGCTGCCCCGTCTGAGGGT
GGCGATTAAAGTTGCTTCACATCCTCAAAAAAAAAAAAAAAAAAAAAAA
AAAAAAAAA.

[0072] A protein sequence from CD320 derived from the mRNA sequence above is as follows:

(SEQ ID NO. 936)
>sp|Q9NPF0|CD320_HUMAN CD320 antigen OS = Homo
sapiens OX = 9606 GN = CD320 PE = 1 SV = 1
MSGGWMAQVGAWRTGALGLALLLLLGLGLGLEAAASPLSTPTSAQAAGP
SSGSCPPTKFQCRTSGLCVPLTWRCDRDLDCSDGSDEEECRIEPCTQKG
QCPPPPGLPCPCTGVSDCSGGTDKKLRNCSRLACLAGELRCTLSDDCIP
LTWRCDGHPDCPDSSDELGCGTNEILPEGDATTMGPPVTLESVTSLRNA
TTMGPPVTLESVPSVGNATSSSAGDQSGSPTAYGVIAAAAVLSASLVTA
TLLLLSWLRAQERLRPLGLLVAMKESLLLSEQKTSLP

[0073] The CD320 DNA sequence from Homo sapiens is as follows: >NM_001165895.2 Homo sapiens CD320 molecule (CD320), transcript variant 2, DNA

(SEQ ID NO. 937)
GCGTGCGCGTGCGCAGGGATAAGAGAGCGGTCTGGACAGCGCGTGGCCG
GCGCCGCTGTGGGGACAGCATGAGCGGCGGTTGGATGGCGCAGGTTGGA
GCGTGGCGAACAGGGGCTCTGGGCCTGGCGCTGCTGCTGCTGCTCGGCC
TCGGACTAGGCCTGGAGGCCGCCGCGAGCCCGCTTTCCACCCCGACCTC
TGCCCAGGCCGCAGGGATTGAGCCATGTACCCAGAAAGGGCAATGCCCA
CCGCCCCCTGGCCTCCCCTGCCCCTGCACCGGCGTCAGTGACTGCTCTG
GGGGAACTGACAAGAAACTGCGCAACTGCAGCCGCCTGGCCTGCCTAGC
AGGCGAGCTCCGTTGCACGCTGAGCGATGACTGCATTCCACTCACGTGG
CGCTGCGACGGCCACCCAGACTGTCCCGACTCCAGCGACGAGCTCGGCT
GTGGAACCAATGAGATCCTCCCGGAAGGGGATGCCACAACCATGGGGCC
CCCTGTGACCCTGGAGAGTGTCACCTCTCTCAGGAATGCCACAACCATG
GGGCCCCCTGTGACCCTGGAGAGTGTCCCCTCTGTCGGGAATGCCACAT
CCTCCTCTGCCGGAGACCAGTCTGGAAGCCCAACTGCCTATGGGGTTAT
TGCAGCTGCTGCGGTGCTCAGTGCAAGCCTGGTCACCGCCACCCTCCTC
CTTTTGTCCTGGCTCCGAGCCCAGGAGCGCCTCCGCCCACTGGGGTTAC
TGGTGGCCATGAAGGAGTCCCTGCTGCTGTCAGAACAGAAGACCTCGCT
GCCCTGAGGACAAGCACTTGCCACCACCGTCACTCAGCCCTGGGCGTAG
CCGGACAGGAGGAGAGCAGTGATGCGGATGGGTACCCGGGCACACCAGC
CCTCAGAGACCTGAGCTCTTCTGGCCACGTGGAACCTCGAACCCGAGCT
CCTGCAGAAGTGGCCCTGGAGATTGAGGGTCCCTGGACACTCCCTATGG
AGATCCGGGGAGCTAGGATGGGGAACCTGCCACAGCCAGAACTGAGGGG
CTGGCCCCAGGCAGCTCCCAGGGGGTAGAACGGCCCTGTGCTTAAGACA
CTCCTGCTGCCCCGTCTGAGGGTGGCAATTAAAGTTGCTTCACATCCTC

[0074] A protein sequence from CD320 derived from the DNA sequence above is as follows:

(SEQ ID NO. 938)
>sp|Q9NPF0-2|CD320_HUMAN Isoform 2 of CD320
antigen OS = Homo sapiens OX = 9606 GN = CD320
MSGGWMAQVGAWRTGALGLALLLLLGLGLGLEAAASPLSTPTSAQAAGI
EPCTQKGQCPPPPGLPCPCTGVSDCSGGTDKKLRNCSRLACLAGELRCT
LSDDCIPLTWRCDGHPDCPDSSDELGCGTNEILPEGDATTMGPPVTLES
VTSLRNATTMGPPVTLESVPSVGNATSSSAGDQSGSPTAYGVIAAAAVL
SASLVTATLLLLSWLRAQERLRPLGLLVAMKESLLLSEQKTSLP

[0075] Further, as used herein, “LRP2” refers to the gene or protein. LRP2 is also known as megalin, LRP-2, Glycoprotein 330, DBS, GP330, Gp330, Calcium Sensor Protein, Heymann Nephritis Antigen Homolog, Low-Density Lipoprotein Receptor-Related Protein 2, EC 1.1.2.3, EC 3.4.21.9, LDL receptor related protein 2. The term LRP2 includes human LRP2, the amino acid and nucleotide sequence of which may be found in, for example, GenBank Accession No. NM_004525.3; mouse LRP2, the amino acid and nucleotide sequence of which may be found in, for example, GenBank Accession No. NM_001081088.2; rat LRP2, the amino acid and nucleotide sequence of which may be found in, for example, GenBank Accession No. NM_030827.1. Additional examples of LRP2 mRNA sequences are readily available using, e.g., GenBank. Additional information is found at FIG. 18.

[0076] One example of LRP2 is: >NM_004525.3 Homo sapiens LDL receptor related protein 2 (LRP2), DNA:

(SEQ ID NO. 939)
GGTCTAAAGGGCTTTATGCACTGTCTGGAGGGTGGGGACTGGCGCGGGTAGAAAACGGGATGCCTCGGGC
GTGGGGGCAGGCTTTTGGCCACTAGGAGCTGGCGGAGGTGCAGACCTAAAGGAGCGTTCGCTAGCAGAGG
CGCTGCCGGTGCGGTGTGCTACGCGCGCCCACCTCCCGGGGAAGGAACGGCGAGGCCGGGGACCGTCGCG
GAGATGGATCGCGGGCCGGCAGCAGTGGCGTGCACGCTGCTCCTGGCTCTCGTCGCCTGCCTAGCGCCGG
CCAGTGGCCAAGAATGTGACAGTGCGCATTTTCGCTGTGGAAGTGGGCATTGCATCCCTGCAGACTGGAG
GTGTGATGGGACCAAAGACTGTTCAGATGACGCGGATGAAATTGGCTGCGCTGTTGTGACCTGCCAGCAG
GGCTATTTCAAGTGCCAGAGTGAGGGACAATGCATCCCCAACTCCTGGGTGTGTGACCAAGATCAAGACT
GTGATGATGGCTCAGATGAACGTCAAGATTGCTCACAAAGTACATGCTCAAGTCATCAGATAACATGCTC
CAATGGTCAGTGTATCCCAAGTGAATACAGGTGCGACCACGTCAGAGACTGCCCCGATGGAGCTGATGAG
AATGACTGCCAGTACCCAACATGTGAGCAGCTTACTTGTGACAATGGGGCCTGCTATAACACCAGTCAGA
AGTGTGATTGGAAAGTTGATTGCAGGGACTCCTCAGATGAAATCAACTGCACTGAGATATGCTTGCACAA
TGAGTTTTCATGTGGCAATGGAGAGTGTATCCCTCGTGCTTATGTCTGTGACCATGACAATGATTGCCAA
GACGGCAGTGACGAACATGCTTGCAACTATCCGACCTGCGGTGGTTACCAGTTCACTTGCCCCAGTGGCC
GATGCATTTATCAAAACTGGGTTTGTGATGGAGAAGATGACTGTAAAGATAATGGAGATGAAGATGGATG
TGAAAGCGGTCCTCATGATGTTCATAAATGTTCCCCAAGAGAATGGTCTTGCCCAGAGTCGGGACGATGC
ATCTCCATTTATAAAGTTTGTGATGGGATTTTAGATTGCCCAGGAAGAGAAGATGAAAACAACACTAGTA
CCGGAAAATACTGTAGTATGACTCTGTGCTCTGCCTTGAACTGCCAGTACCAGTGCCATGAGACGCCGTA
TGGAGGAGCGTGTTTTTGTCCCCCAGGTTATATCATCAACCACAATGACAGCCGTACCTGTGTTGAGTTT
GATGATTGCCAGATATGGGGAATTTGTGACCAGAAGTGTGAAAGCCGACCTGGCCGTCACCTGTGCCACT
GTGAAGAAGGGTATATCTTGGAGCGTGGACAGTATTGCAAAGCTAATGATTCCTTTGGCGAGGCCTCCAT
TATCTTCTCCAATGGTCGGGATTTGTTAATTGGTGATATTCATGGAAGGAGCTTCCGGATCCTAGTGGAG
TCTCAGAATCGTGGAGTGGCCGTGGGTGTGGCTTTCCACTATCACCTGCAAAGAGTTTTTTGGACAGACA
CCGTGCAAAATAAGGTTTTTTCAGTTGACATTAATGGTTTAAATATCCAAGAGGTTCTCAATGTTTCTGT
TGAAACCCCAGAGAACCTGGCTGTGGACTGGGTTAATAATAAAATCTATCTAGTGGAAACCAAGGTCAAC
CGCATAGATATGGTAAATTTGGATGGAAGCTATCGGGTTACCCTTATAACTGAAAACTTGGGGCATCCTA
GAGGAATTGCCGTGGACCCAACTGTTGGTTATTTATTTTTCTCAGATTGGGAGAGCCTTTCTGGGGAACC
TAAGCTGGAAAGGGCATTCATGGATGGCAGCAACCGTAAAGACTTGGTGAAAACAAAGCTGGGATGGCCT
GCTGGGGTAACTCTGGATATGATATCGAAGCGTGTTTACTGGGTTGACTCTCGGTTTGATTACATTGAAA
CTGTAACTTATGATGGAATTCAAAGGAAGACTGTAGTTCATGGAGGCTCCCTCATTCCTCATCCCTTTGG
AGTAAGCTTATTTGAAGGTCAGGTGTTCTTTACAGATTGGACAAAGATGGCCGTGCTGAAGGCAAACAAG
TTCACAGAGACCAACCCACAAGTGTACTACCAGGCTTCCCTGAGGCCCTATGGAGTGACTGTTTACCATT
CCCTCAGACAGCCCTATGCTACCAATCCGTGTAAAGATAACAATGGGGGCTGTGAGCAGGTCTGTGTCCT
CAGCCACAGAACAGATAATGATGGTTTGGGTTTCCGTTGCAAGTGCACATTCGGCTTCCAACTGGATACA
GATGAGCGCCACTGCATTGCTGTTCAGAATTTCCTCATTTTTTCATCCCAAGTTGCTATTCGTGGGATCC
CGTTCACCTTGTCTACCCAGGAAGATGTCATGGTTCCAGTTTCGGGGAATCCTTCTTTCTTTGTCGGGAT
TGATTTTGACGCCCAGGACAGCACTATCTTTTTTTCAGATATGTCAAAACACATGATTTTTAAGCAAAAG
ATTGATGGCACAGGAAGAGAAATTCTCGCAGCTAACAGGGTGGAAAATGTTGAAAGTTTGGCTTTTGATT
GGATTTCAAAGAATCTCTATTGGACAGACTCTCATTACAAGAGTATCAGTGTCATGAGGCTAGCTGATAA
AACGAGACGCACAGTAGTTCAGTATTTAAATAACCCACGGTCGGTGGTAGTTCATCCTTTTGCCGGGTAT
CTATTCTTCACTGATTGGTTCCGTCCTGCTAAAATTATGAGAGCATGGAGTGACGGATCTCACCTCTTGC
CTGTAATAAACACTACTCTTGGATGGCCCAATGGCTTGGCCATCGATTGGGCTGCTTCACGATTGTACTG
GGTAGATGCCTATTTTGATAAAATTGAGCACAGCACCTTTGATGGTTTAGACAGAAGAAGACTGGGCCAT
ATAGAGCAGATGACACATCCGTTTGGACTTGCCATCTTTGGAGAGCATTTATTTTTTACTGACTGGAGAC
TGGGTGCCATTATTCGAGTCAGGAAAGCAGATGGTGGAGAAATGACAGTTATCCGAAGTGGCATTGCTTA
CATACTGCATTTGAAATCGTATGATGTCAACATCCAGACTGGTTCTAACGCCTGTAATCAACCCACGCAT
CCTAACGGTGACTGCAGCCACTTCTGCTTCCCGGTGCCAAATTTCCAGCGAGTGTGTGGGTGCCCTTATG
GAATGAGGCTGGCTTCCAATCACTTGACATGCGAGGGGGACCCAACCAATGAACCACCCACAGAGCAGTG
TGGCTTATTTTCCTTCCCCTGTAAAAATGGCAGATGTGTGCCCAATTACTATCTCTGTGATGGAGTCGAT
GATTGTCATGATAACAGTGATGAGCAACTATGTGGCACACTTAATAATACCTGTTCATCTTCGGCGTTCA
CCTGTGGCCATGGGGAGTGCATTCCTGCACACTGGCGCTGTGACAAACGCAACGACTGTGTGGATGGCAG
TGATGAGCACAACTGCCCCACCCACGCACCTGCTTCCTGCCTTGACACCCAATACACCTGTGATAATCAC
CAGTGTATCTCAAAGAACTGGGTCTGTGACACAGACAATGATTGTGGGGATGGATCTGATGAAAAGAACT
GCAATTCGACAGAGACATGCCAACCTAGTCAGTTTAATTGCCCCAATCATCGATGTATTGACCTATCGTT
TGTCTGTGATGGTGACAAGGATTGTGTTGATGGATCTGATGAGGTTGGTTGTGTATTAAACTGTACTGCT
TCTCAATTCAAGTGTGCCAGTGGGGATAAATGTATTGGCGTCACAAATCGTTGTGATGGTGTTTTTGATT
GCAGTGACAACTCGGATGAAGCAGGCTGTCCAACCAGGCCTCCTGGTATGTGCCACTCAGATGAATTTCA
GTGCCAAGAAGATGGTATCTGCATCCCGAACTTCTGGGAATGTGATGGGCATCCAGACTGCCTCTATGGA
TCTGATGAGCACAATGCCTGTGTCCCCAAGACTTGCCCTTCATCATATTTCCACTGTGACAACGGAAACT
GCATCCACAGGGCATGGCTCTGTGATCGGGACAATGACTGCGGGGATATGAGTGATGAGAAGGACTGCCC
TACTCAGCCCTTTCGCTGTCCTAGTTGGCAATGGCAGTGTCTTGGCCATAACATCTGTGTGAATCTGAGT
GTAGTGTGTGATGGCATCTTTGACTGCCCCAATGGGACAGATGAGTCCCCACTTTGCAATGGGAACAGCT
GCTCAGATTTCAATGGTGGTTGTACTCACGAGTGTGTTCAAGAGCCCTTTGGGGCTAAATGCCTATGTCC
ATTGGGATTCTTACTTGCCAATGATTCTAAGACCTGTGAAGACATAGATGAATGTGATATTCTAGGCTCT
TGTAGCCAGCACTGTTACAATATGAGAGGTTCTTTCCGGTGCTCGTGTGATACAGGCTACATGTTAGAAA
GTGATGGGAGGACTTGCAAAGTTACAGCATCTGAGAGTCTGCTGTTACTTGTGGCAAGTCAGAACAAAAT
TATTGCCGACAGTGTCACCTCCCAGGTCCACAATATCTATTCATTGGTCGAGAATGGTTCTTACATTGTA
GCTGTTGATTTTGATTCAATTAGTGGTCGTATCTTTTGGTCTGATGCAACTCAGGGTAAAACCTGGAGTG
CGTTTCAAAATGGAACGGACAGAAGAGTGGTATTTGACAGTAGCATCATCTTGACTGAAACTATTGCAAT
AGATTGGGTAGGTCGTAATCTTTACTGGACAGACTATGCTCTGGAAACAATTGAAGTCTCCAAAATTGAT
GGGAGCCACAGGACTGTGCTGATTAGTAAAAACCTAACAAATCCAAGAGGACTAGCATTAGATCCCAGAA
TGAATGAGCATCTACTGTTCTGGTCTGACTGGGGCCACCACCCTCGCATCGAGCGAGCCAGCATGGACGG
CAGCATGCGCACTGTCATTGTCCAGGACAAGATCTTCTGGCCCTGCGGCTTAACTATTGACTACCCCAAC
AGACTGCTCTACTTCATGGACTCCTATCTTGATTACATGGACTTTTGTGATTATAATGGACACCATCGGA
GACAGGTGATAGCCAGTGATTTGATTATACGGCACCCCTATGCCCTAACTCTCTTTGAAGACTCTGTGTA
CTGGACTGACCGTGCTACTCGTCGGGTTATGCGAGCCAACAAGTGGCATGGAGGGAACCAGTCAGTTGTA
ATGTATAATATTCAATGGCCCCTTGGGATTGTTGCGGTTCATCCTTCGAAACAACCAAATTCCGTGAATC
CATGTGCCTTTTCCCGCTGCAGCCATCTCTGCCTGCTTTCCTCACAGGGGCCTCATTTTTACTCCTGTGT
TTGTCCTTCAGGATGGAGTCTGTCTCCTGATCTCCTGAATTGCTTGAGAGATGATCAACCTTTCTTAATA
ACTGTAAGGCAACATATAATTTTTGGAATCTCCCTTAATCCTGAGGTGAAGAGCAATGATGCTATGGTCC
CCATAGCAGGGATACAGAATGGTTTAGATGTTGAATTTGATGATGCTGAGCAATACATCTATTGGGTTGA
AAATCCAGGTGAAATTCACAGAGTGAAGACAGATGGCACCAACAGGACAGTATTTGCTTCTATATCTATG
GTGGGGCCTTCTATGAACCTGGCCTTAGATTGGATTTCAAGAAACCTTTATTCTACCAATCCTAGAACTC
AGTCAATCGAGGTTTTGACACTCCACGGAGATATCAGATACAGAAAAACATTGATTGCCAATGATGGGAC
AGCTCTTGGAGTTGGCTTTCCAATTGGCATAACTGTTGATCCTGCTCGTGGGAAGCTGTACTGGTCAGAC
CAAGGAACTGACAGTGGGGTTCCTGCCAAGATCGCCAGTGCTAACATGGATGGCACATCTGTGAAAACTC
TCTTTACTGGGAACCTCGAACACCTGGAGTGTGTCACTCTTGACATCGAAGAGCAGAAACTCTACTGGGC
AGTCACTGGAAGAGGAGTGATTGAAAGAGGAAACGTGGATGGAACAGATCGAATGATCCTGGTACACCAG
CTTTCCCACCCCTGGGGAATTGCAGTCCATGATTCTTTCCTTTATTATACTGATGAACAGTATGAGGTCA
TTGAAAGAGTTGATAAGGCCACTGGGGCCAACAAAATAGTCTTGAGAGATAATGTTCCAAATCTGAGGGG
TCTTCAAGTTTATCACAGACGCAATGCCGCCGAATCCTCAAATGGCTGTAGCAACAACATGAATGCCTGT
CAGCAGATTTGCCTGCCTGTACCAGGAGGATTGTTTTCCTGCGCCTGTGCCACTGGATTTAAACTCAATC
CTGATAATCGGTCCTGCTCTCCATATAACTCTTTCATTGTTGTTTCAATGCTGTCTGCAATCAGAGGCTT
TAGCTTGGAATTGTCAGATCATTCAGAAACCATGGTGCCGGTGGCAGGCCAAGGACGAAACGCACTGCAT
GTGGATGTGGATGTGTCCTCTGGCTTTATTTATTGGTGTGATTTTAGCAGCTCAGTGGCATCTGATAATG
CGATCCGTAGAATTAAACCAGATGGATCTTCTCTGATGAACATTGTGACACATGGAATAGGAGAAAATGG
AGTCCGGGGTATTGCAGTGGATTGGGTAGCAGGAAATCTTTATTTCACCAATGCCTTTGTTTCTGAAACA
CTGATAGAAGTTCTGCGGATCAATACTACTTACCGCCGTGTTCTTCTTAAAGTCACAGTGGACATGCCTA
GGCATATTGTTGTAGATCCCAAGAACAGATACCTCTTCTGGGCTGACTATGGGCAGAGACCAAAGATTGA
GCGTTCTTTCCTTGACTGTACCAATCGAACAGTGCTTGTGTCAGAGGGCATTGTCACACCACGGGGCTTG
GCAGTGGACCGAAGTGATGGCTACGTTTATTGGGTTGATGATTCTTTAGATATAATTGCAAGGATTCGTA
TCAATGGAGAGAACTCTGAAGTGATTCGTTATGGCAGTCGTTACCCAACTCCTTATGGCATCACTGTTTT
TGAAAATTCTATCATATGGGTAGATAGGAATTTGAAAAAGATCTTCCAAGCCAGCAAGGAACCAGAGAAC
ACAGAGCCACCCACAGTGATAAGAGACAATATCAACTGGCTAAGAGATGTGACCATCTTTGACAAGCAAG
TCCAGCCCCGGTCACCAGCAGAGGTCAACAACAACCCTTGCTTGGAAAACAATGGTGGGTGCTCTCATCT
CTGCTTTGCTCTGCCTGGATTGCACACCCCAAAATGTGACTGTGCCTTTGGGACCCTGCAAAGTGATGGC
AAGAATTGTGCCATTTCAACAGAAAATTTCCTCATCTTTGCCTTGTCTAATTCCTTGAGAAGCTTACACT
TGGACCCTGAAAACCATAGCCCACCTTTCCAAACAATAAATGTGGAAAGAACTGTCATGTCTCTAGACTA
TGACAGTGTAAGTGATAGAATCTACTTCACACAAAATTTAGCCTCTGGAGTTGGACAGATTTCCTATGCC
ACCCTGTCTTCAGGGATCCATACTCCAACTGTCATTGCTTCAGGTATAGGGACTGCTGATGGCATTGCCT
TTGACTGGATTACTAGAAGAATTTATTACAGTGACTACCTCAACCAGATGATTAATTCCATGGCTGAAGA
TGGGTCTAACCGCACTGTGATAGCCCGCGTTCCAAAACCAAGAGCAATTGTGTTAGATCCCTGCCAAGGG
TACCTGTACTGGGCTGACTGGGATACACATGCCAAAATCGAGAGAGCCACATTGGGAGGAAACTTCCGCG
TACCCATTGTGAACAGCAGTCTGGTCATGCCCAGTGGGCTGACTCTGGACTATGAAGAGGACCTTCTCTA
CTGGGTGGATGCTAGTCTGCAGAGGATTGAACGCAGCACTCTGACGGGCGTGGATCGTGAAGTCATTGTC
AATGCAGCCGTTCATGCTTTTGGCTTGACTCTCTATGGCCAGTATATTTACTGGACTGACTTGTACACAC
AAAGAATTTACCGAGCTAACAAATATGACGGGTCAGGTCAGATTGCAATGACCACAAATTTGCTCTCCCA
GCCCAGGGGAATCAACACTGTTGTGAAGAACCAGAAACAACAGTGTAACAATCCTTGTGAACAGTTTAAT
GGGGGCTGCAGCCATATCTGTGCACCAGGTCCAAATGGTGCCGAGTGCCAGTGTCCACATGAGGGCAACT
GGTATTTGGCCAACAACAGGAAGCACTGCATTGTGGACAATGGTGAACGATGTGGTGCATCTTCCTTCAC
CTGCTCCAATGGGCGCTGCATCTCGGAAGAGTGGAAGTGTGATAATGACAACGACTGTGGGGATGGCAGT
GATGAGATGGAAAGTGTCTGTGCACTTCACACCTGCTCACCGACAGCCTTCACCTGTGCCAATGGGCGAT
GTGTCCAATACTCTTACCGCTGTGATTACTACAATGACTGTGGTGATGGCAGTGATGAGGCAGGGTGCCT
GTTCAGGGACTGCAATGCCACCACGGAGTTTATGTGCAATAACAGAAGGTGCATACCTCGTGAGTTTATC
TGCAATGGTGTAGACAACTGCCATGATAATAACACTTCAGATGAGAAAAATTGCCCTGATCGCACTTGCC
AGTCTGGATACACAAAATGTCATAATTCAAATATTTGTATTCCTCGCGTTTATTTGTGTGACGGAGACAA
TGACTGTGGAGATAACAGTGATGAAAACCCTACTTATTGCACCACTCACACGTGCAGCAGCAGTGAGTTC
CAATGCGCATCTGGGCGCTGTATTCCTCAACATTGGTATTGTGATCAAGAAACAGATTGTTTTGATGCCT
CTGATGAACCTGCCTCTTGTGGTCACTCTGAGCGAACATGCCTAGCTGATGAGTTCAAGTGTGATGGTGG
GAGGTGCATCCCAAGCGAATGGATCTGTGACGGTGATAATGACTGTGGGGATATGAGTGACGAGGATAAA
AGGCACCAGTGTCAGAATCAAAACTGCTCGGATTCCGAGTTTCTCTGTGTAAATGACAGACCTCCGGACA
GGAGGTGCATTCCCCAGTCTTGGGTCTGTGATGGCGATGTGGATTGTACTGACGGCTACGATGAGAATCA
GAATTGCACCAGGAGAACTTGCTCTGAAAATGAATTCACCTGTGGTTACGGACTGTGTATCCCAAAGATA
TTCAGGTGTGACCGGCACAATGACTGTGGTGACTATAGCGACGAGAGGGGCTGCTTATACCAGACTTGCC
AACAGAATCAGTTTACCTGTCAGAACGGGCGCTGCATTAGTAAAACCTTCGTCTGTGATGAGGATAATGA
CTGTGGAGACGGATCTGATGAGCTGATGCACCTGTGCCACACCCCAGAACCCACGTGTCCACCTCACGAG
TTCAAGTGTGACAATGGGCGCTGCATCGAGATGATGAAACTCTGCAACCACCTAGATGACTGTTTGGACA
ACAGCGATGAGAAAGGCTGTGGCATTAATGAATGCCATGACCCTTCAATCAGTGGCTGCGATCACAACTG
CACAGACACCTTAACCAGTTTCTATTGTTCCTGTCGTCCTGGTTACAAGCTCATGTCTGACAAGCGGACT
TGTGTTGATATTGATGAATGCACAGAGATGCCTTTTGTCTGTAGCCAGAAGTGTGAGAATGTAATAGGCT
CCTACATCTGTAAGTGTGCCCCAGGCTACCTCCGAGAACCAGATGGAAAGACCTGCCGGCAAAACAGTAA
CATCGAACCCTATCTCATTTTTAGCAACCGTTACTATTTGAGAAATTTAACTATAGATGGCTATTTTTAC
TCCCTCATCTTGGAAGGACTGGACAATGTTGTGGCATTAGATTTTGACCGAGTAGAGAAGAGATTGTATT
GGATTGATACACAGAGGCAAGTCATTGAGAGAATGTTTCTGAATAAGACAAACAAGGAGACAATCATAAA
CCACAGACTACCAGCTGCAGAAAGTCTGGCTGTAGACTGGGTTTCCAGAAAGCTCTACTGGTTGGATGCC
CGCCTGGATGGCCTCTTTGTCTCTGACCTCAATGGTGGACACCGCCGCATGCTGGCCCAGCACTGTGTGG
ATGCCAACAACACCTTCTGCTTTGATAATCCCAGAGGACTTGCCCTTCACCCTCAATATGGGTACCTCTA
CTGGGCAGACTGGGGTCACCGCGCATACATTGGGAGAGTAGGCATGGATGGAACCAACAAGTCTGTGATA
ATCTCCACCAAGTTAGAGTGGCCTAATGGCATCACCATTGATTACACCAATGATCTACTCTACTGGGCAG
ATGCCCACCTGGGTTACATAGAGTACTCTGATTTGGAGGGCCACCATCGACACACGGTGTATGATGGGGC
ACTGCCTCACCCTTTCGCTATTACCATTTTTGAAGACACTATTTATTGGACAGATTGGAATACAAGGACA
GTGGAAAAGGGAAACAAATATGATGGATCAAATAGACAGACACTGGTGAACACAACACACAGACCATTTG
ACATCCATGTGTACCATCCATATAGGCAGCCCATTGTGAGCAATCCCTGTGGTACCAACAATGGTGGCTG
TTCTCATCTCTGCCTCATCAAGCCAGGAGGAAAAGGGTTCACTTGCGAGTGTCCAGATGACTTCCGCACC
CTTCAGCTGAGTGGCAGCACCTACTGCATGCCCATGTGCTCCAGCACCCAGTTCCTGTGCGCTAACAATG
AAAAGTGCATTCCTATCTGGTGGAAATGTGATGGACAGAAAGACTGCTCAGATGGCTCTGATGAACTGGC
CCTTTGCCCGCAGCGCTTCTGCCGACTGGGACAGTTCCAGTGCAGTGACGGCAACTGCACCAGCCCGCAG
ACTTTATGCAATGCTCACCAAAATTGCCCTGATGGGTCTGATGAAGACCGTCTTCTTTGTGAGAATCACC
ACTGTGACTCCAATGAATGGCAGTGCGCCAACAAACGTTGCATCCCAGAATCCTGGCAGTGTGACACATT
TAACGACTGTGAGGATAACTCAGATGAAGACAGTTCCCACTGTGCCAGCAGGACCTGCCGGCCGGGCCAG
TTTCGGTGTGCTAATGGCCGCTGCATCCCGCAGGCCTGGAAGTGTGATGTGGATAATGATTGTGGAGACC
ACTCGGATGAGCCCATTGAAGAATGCATGAGCTCTGCCCATCTCTGTGACAACTTCACAGAATTCAGCTG
CAAAACAAATTACCGCTGCATCCCAAAGTGGGCCGTGTGCAATGGTGTAGATGACTGCAGGGACAACAGT
GATGAGCAAGGCTGTGAGGAGAGGACATGCCATCCTGTGGGGGATTTCCGCTGTAAAAATCACCACTGCA
TCCCTCTTCGTTGGCAGTGTGATGGGCAAAATGACTGTGGAGATAACTCAGATGAGGAAAACTGTGCTCC
CCGGGAGTGCACAGAGAGCGAGTTTCGATGTGTCAATCAGCAGTGCATTCCCTCGCGATGGATCTGTGAC
CATTACAACGACTGTGGGGACAACTCAGATGAACGGGACTGTGAGATGAGGACCTGCCATCCTGAATATT
TTCAGTGTACAAGTGGACATTGTGTACACAGTGAACTGAAATGCGATGGATCCGCTGACTGTTTGGATGC
GTCTGATGAAGCTGATTGTCCCACACGCTTTCCTGATGGTGCATACTGCCAGGCTACTATGTTCGAATGC
AAAAACCATGTTTGTATCCCGCCATATTGGAAATGTGATGGCGATGATGACTGTGGCGATGGTTCAGATG
AAGAACTTCACCTGTGCTTGGATGTTCCCTGTAATTCACCAAACCGTTTCCGGTGTGACAACAATCGCTG
CATTTATAGTCATGAGGTGTGCAATGGTGTGGATGACTGTGGAGATGGAACTGATGAGACAGAGGAGCAC
TGTAGAAAACCGACCCCTAAACCTTGTACAGAATATGAATATAAGTGTGGCAATGGGCATTGCATTCCAC
ATGACAATGTGTGTGATGATGCCGATGACTGTGGTGACTGGTCCGATGAACTGGGTTGCAATAAAGGAAA
AGAAAGAACATGTGCTGAAAATATATGCGAGCAAAATTGTACCCAATTAAATGAAGGAGGATTTATCTGC
TCCTGTACAGCTGGGTTCGAAACCAATGTTTTTGACAGAACCTCCTGTCTAGATATCAATGAATGTGAAC
AATTTGGGACTTGTCCCCAGCACTGCAGAAATACCAAAGGAAGTTATGAGTGTGTCTGTGCTGATGGCTT
CACGTCTATGAGTGACCGCCCTGGAAAACGATGTGCAGCTGAGGGTAGCTCTCCTTTGTTGCTACTGCCT
GACAATGTCCGAATTCGAAAATATAATCTCTCATCTGAGAGGTTCTCAGAGTATCTTCAAGATGAGGAAT
ATATCCAAGCTGTTGATTATGATTGGGATCCCAAGGACATAGGCCTCAGTGTTGTGTATTACACTGTGCG
AGGGGAGGGCTCTAGGTTTGGTGCTATCAAACGTGCCTACATCCCCAACTTTGAATCCGGCCGCAATAAT
CTTGTGCAGGAAGTTGACCTGAAACTGAAATACGTAATGCAGCCAGATGGAATAGCAGTGGACTGGGTTG
GAAGGCATATTTACTGGTCAGATGTCAAGAATAAACGCATTGAGGTGGCTAAACTTGATGGAAGGTACAG
AAAGTGGCTGATTTCCACTGACCTGGACCAACCAGCTGCTATTGCTGTGAATCCCAAACTAGGGCTTATG
TTCTGGACTGACTGGGGAAAGGAACCTAAAATCGAGTCTGCCTGGATGAATGGAGAGGACCGCAACATCC
TGGTTTTCGAGGACCTTGGTTGGCCAACTGGCCTTTCTATCGATTATTTGAACAATGACCGAATCTACTG
GAGTGACTTCAAGGAGGACGTTATTGAAACCATAAAATATGATGGGACTGATAGGAGAGTCATTGCAAAG
GAAGCAATGAACCCTTACAGCCTGGACATCTTTGAAGACCAGTTATACTGGATATCTAAGGAAAAGGGAG
AAGTATGGAAACAAAATAAATTTGGGCAAGGAAAGAAAGAGAAAACGCTGGTAGTGAACCCTTGGCTCAC
TCAAGTTCGAATCTTTCATCAACTCAGATACAATAAGTCAGTGCCCAACCTTTGCAAACAGATCTGCAGC
CACCTCTGCCTTCTGAGACCTGGAGGATACAGCTGTGCCTGTCCCCAAGGCTCCAGCTTTATAGAGGGGA
GCACCACTGAGTGTGATGCAGCCATCGAACTGCCTATCAACCTGCCCCCCCCATGCAGGTGCATGCACGG
AGGAAATTGCTATTTTGATGAGACTGACCTCCCCAAATGCAAGTGTCCTAGCGGCTACACCGGAAAATAT
TGTGAAATGGCGTTTTCAAAAGGCATCTCTCCAGGAACAACCGCAGTAGCTGTGCTGTTGACAATCCTCT
TGATCGTCGTAATTGGAGCTCTGGCAATTGCAGGATTCTTCCACTATAGAAGGACCGGCTCCCTTTTGCC
TGCTCTGCCCAAGCTGCCAAGCTTAAGCAGTCTCGTCAAGCCCTCTGAAAATGGGAATGGGGTGACCTTC
AGATCAGGGGCAGATCTTAACATGGATATTGGAGTGTCTGGTTTTGGACCTGAGACTGCTATTGACAGGT
CAATGGCAATGAGTGAAGACTTTGTCATGGAAATGGGGAAGCAGCCCATAATATTTGAAAACCCAATGTA
CTCAGCCAGAGACAGTGCTGTCAAAGTGGTTCAGCCAATCCAGGTGACTGTATCTGAAAATGTGGATAAT
AAGAATTATGGAAGTCCCATAAACCCTTCTGAGATAGTTCCAGAGACAAACCCAACTTCACCAGCTGCTG
ATGGAACTCAGGTGACAAAATGGAATCTCTTCAAACGAAAATCTAAACAAACTACCAACTTTGAAAATCC
AATCTATGCACAGATGGAGAACGAGCAAAAGGAAAGTGTTGCTGCGACACCACCTCCATCACCTTCGCTC
CCTGCTAAGCCTAAGCCTCCTTCGAGAAGAGACCCAACTCCAACCTATTCTGCAACAGAAGACACTTTTA
AAGACACCGCAAATCTTGTTAAAGAAGACTCTGAAGTATAGCTATACCAGCTATTTAGGGAATAATTAGA
AACACACTTTTGCACATATATTTITTACAAACAGATGAAAAAAGTTAACATTCAGTACTTTATGAAAAAA
ATATATTTTTCCCTGTTTGCCTATAGTTGGAGGTATCCTGTGTGTCTTTTTTTACTTATGCCGTCTCATA
TTTTTACAAATAATTATCACAATGTACTATATGTATATCTTTGCACTGAAGTTGTCTGAAGGTAATACTA
TAAATATATTGTATATTTGTAAATTTTGGAAAGATTATCCTGTTACTGAATTTGCTAATAAAGATGTCTG
CTGATTTGGTTGGTGATCATTATAGTAAATGATCCAACAAGAAAAGGAATTGACTGGGGACCTTTAGCCG
TGTCTAAAGAAGAGGCACCACTCATATTTCCTATAAAATTATCTAGGAAAGGAATCCAGGCCCCGCTCTT
GGGTCCATTTTTACACATTAGCACTTAATTAATGTTCAATATTACATGTCAATTTGATTAATGGCTATGT
TGATAGGGGCCACTATGTGTTGTATAGACATCTGGACTTGACTGTAGACTCCTCAGATAATACAGAAGGT
AGGAAAAGCAATTCAGTTTGGCCCTTCTGTGTGTTGGCATTGTCTAACCAGAACTCTCTGTTTCATGTGT
GTTCTCTCACTAGCTGCCAAGACAACATTTTTATTTGTGATGTCTATGAGGAAATCCCATATCATTAAGT
GCCAGTGTCCTGCATTGAGTTTGTGGTTAATTAAATGAGCTCTTCTGCTGATGGACCCTGGAGCAATTTC
TCCCCTCACCTGACATTCAAGGTGGTCACCTGCCCTAGTAGTTGGAGCTCAGTAGCTGAATTTCTGAAAC
CAAATCTGTGTCTTCATAAAATAAGGTGCAAAAAAAAAAAATACCAGTTAAGTAAAGCCTCAACTGGGTT
TTTGTTTCTATGAAAATATCATTATAATCACTATTTATTTCCTAAGTTGAACCTGAATAGAAAGGGAAAC
CATTCTTATTAAGCTTTTTATTAGGCCCTGTGGCTAAATGTGTACATTTATATTAGAATGTACTGTACAG
TCCAGATCTTTTCTTTAATTCTTATTGGTTTTTTTTTTTTTAGAGATGGAGTCTTGCTATATTGCCAAGG
CTGATCTTGAAGTCCTGGGCTCAAGTGATCCTCCCACCTCAGCCTCCTGAGTGGTTGGGGTTACGGGCGT
GAGCCACTGTGCCTGGCTTCCAGCTCTCCTCTTAAATAGTGGGTATAGTCTGCACAACAGGAACCATGGC
AGGAATATACACTTTCCCATAGCAAATAGCATACCTGACTCTCTGTGCTAATATTGCACATTTGTTAAAC
AATGAATGAATGGATGGATGGATGGATGGATGAATGAATGAAACATATACTACTGATTATTTTATTCCAG
AGTTCTCAAAATATTTGTTGCTGATATTTTGAGTGCTGACTGTAATTACTTTGATTAGATAAACAACTGG
AAATAATGCTGCTGAAAAAGTTCTAATAAATGTGTATTTTATCAGA.

[0077] One example of a protein sequence from the above LRP2 DNA is:

>sp|P98164|LRP2_HUMAN Low-density lipoprotein receptor-related
protein 2 OS = Homo sapiens OX = 9606 GN = LRP2 PE = 1 SV = 3
(SEQ ID NO. 940)
MDRGPAAVACTLLLALVACLAPASGQECDSAHFRCGSGHCIPADWRCDGTKDCSDDADEI
GCAVVTCQQGYFKCQSEGQCIPNSWVCDQDQDCDDGSDERQDCSQSTCSSHQITCSNGQC
IPSEYRCDHVRDCPDGADENDCQYPTCEQLTCDNGACYNTSQKCDWKVDCRDSSDEINCT
EICLHNEFSCGNGECIPRAYVCDHDNDCQDGSDEHACNYPTCGGYQFTCPSGRCIYQNWV
CDGEDDCKDNGDEDGCESGPHDVHKCSPREWSCPESGRCISIYKVCDGILDCPGREDENN
TSTGKYCSMTLCSALNCQYQCHETPYGGACFCPPGYIINHNDSRTCVEFDDCQIWGICDQ
KCESRPGRHLCHCEEGYILERGQYCKANDSFGEASIIFSNGRDLLIGDIHGRSFRILVES
QNRGVAVGVAFHYHLQRVFWTDTVQNKVFSVDINGLNIQEVLNVSVETPENLAVDWVNNK
IYLVETKVNRIDMVNLDGSYRVTLITENLGHPRGIAVDPTVGYLFFSDWESLSGEPKLER
AFMDGSNRKDLVKTKLGWPAGVTLDMISKRVYWVDSRFDYIETVTYDGIQRKTVVHGGSL
IPHPFGVSLFEGQVFFTDWTKMAVLKANKFTETNPQVYYQASLRPYGVTVYHSLRQPYAT
NPCKDNNGGCEQVCVLSHRTDNDGLGFRCKCTFGFQLDTDERHCIAVQNFLIFSSQVAIR
GIPFTLSTQEDVMVPVSGNPSFFVGIDFDAQDSTIFFSDMSKHMIFKQKIDGTGREILAA
NRVENVESLAFDWISKNLYWTDSHYKSISVMRLADKTRRTVVQYLNNPRSVVVHPFAGYL
FFTDWFRPAKIMRAWSDGSHLLPVINTTLGWPNGLAIDWAASRLYWVDAYFDKIEHSTFD
GLDRRRLGHIEQMTHPFGLAIFGEHLFFTDWRLGAIIRVRKADGGEMTVIRSGIAYILHL
KSYDVNIQTGSNACNQPTHPNGDCSHFCFPVPNFQRVCGCPYGMRLASNHLTCEGDPTNE
PPTEQCGLFSFPCKNGRCVPNYYLCDGVDDCHDNSDEQLCGTLNNTCSSSAFTCGHGECI
PAHWRCDKRNDCVDGSDEHNCPTHAPASCLDTQYTCDNHQCISKNWVCDTDNDCGDGSDE
KNCNSTETCQPSQFNCPNHRCIDLSFVCDGDKDCVDGSDEVGCVLNCTASQFKCASGDKC
IGVTNRCDGVFDCSDNSDEAGCPTRPPGMCHSDEFQCQEDGICIPNFWECDGHPDCLYGS
DEHNACVPKTCPSSYFHCDNGNCIHRAWLCDRDNDCGDMSDEKDCPTQPFRCPSWQWQCL
GHNICVNLSVVCDGIFDCPNGTDESPLCNGNSCSDFNGGCTHECVQEPFGAKCLCPLGFL
LANDSKTCEDIDECDILGSCSQHCYNMRGSFRCSCDTGYMLESDGRTCKVTASESLLLLV
ASQNKIIADSVTSQVHNIYSLVENGSYIVAVDFDSISGRIFWSDATQGKTWSAFQNGTDR
RVVFDSSIILTETIAIDWVGRNLYWTDYALETIEVSKIDGSHRTVLISKNLTNPRGLALD
PRMNEHLLFWSDWGHHPRIERASMDGSMRTVIVQDKIFWPCGLTIDYPNRLLYFMDSYLD
YMDFCDYNGHHRRQVIASDLIIRHPYALTLFEDSVYWTDRATRRVMRANKWHGGNQSVVM
YNIQWPLGIVAVHPSKQPNSVNPCAFSRCSHLCLLSSQGPHFYSCVCPSGWSLSPDLLNC
LRDDQPFLITVRQHIIFGISLNPEVKSNDAMVPIAGIQNGLDVEFDDAEQYIYWVENPGE
IHRVKTDGTNRTVFASISMVGPSMNLALDWISRNLYSTNPRTQSIEVLTLHGDIRYRKTL
IANDGTALGVGFPIGITVDPARGKLYWSDQGTDSGVPAKIASANMDGTSVKTLFTGNLEH
LECVTLDIEEQKLYWAVTGRGVIERGNVDGTDRMILVHQLSHPWGIAVHDSFLYYTDEQY
EVIERVDKATGANKIVLRDNVPNLRGLQVYHRRNAAESSNGCSNNMNACQQICLPVPGGL
FSCACATGFKLNPDNRSCSPYNSFIVVSMLSAIRGFSLELSDHSETMVPVAGQGRNALHV
DVDVSSGFIYWCDFSSSVASDNAIRRIKPDGSSLMNIVTHGIGENGVRGIAVDWVAGNLY
FTNAFVSETLIEVLRINTTYRRVLLKVTVDMPRHIVVDPKNRYLFWADYGQRPKIERSFL
DCTNRTVLVSEGIVTPRGLAVDRSDGYVYWVDDSLDIIARIRINGENSEVIRYGSRYPTP
YGITVFENSIIWVDRNLKKIFQASKEPENTEPPTVIRDNINWLRDVTIFDKQVQPRSPAE
VNNNPCLENNGGCSHLCFALPGLHTPKCDCAFGTLQSDGKNCAISTENFLIFALSNSLRS
LHLDPENHSPPFQTINVERTVMSLDYDSVSDRIYFTQNLASGVGQISYATLSSGIHTPTV
IASGIGTADGIAFDWITRRIYYSDYLNQMINSMAEDGSNRTVIARVPKPRAIVLDPCQGY
LYWADWDTHAKIERATLGGNFRVPIVNSSLVMPSGLTLDYEEDLLYWVDASLQRIERSTL
TGVDREVIVNAAVHAFGLTLYGQYIYWTDLYTQRIYRANKYDGSGQIAMTTNLLSQPRGI
NTVVKNQKQQCNNPCEQFNGGCSHICAPGPNGAECQCPHEGNWYLANNRKHCIVDNGERC
GASSFTCSNGRCISEEWKCDNDNDCGDGSDEMESVCALHTCSPTAFTCANGRCVQYSYRC
DYYNDCGDGSDEAGCLFRDCNATTEFMCNNRRCIPREFICNGVDNCHDNNTSDEKNCPDR
TCQSGYTKCHNSNICIPRVYLCDGDNDCGDNSDENPTYCTTHTCSSSEFQCASGRCIPQH
WYCDQETDCFDASDEPASCGHSERTCLADEFKCDGGRCIPSEWICDGDNDCGDMSDEDKR
HQCQNQNCSDSEFLCVNDRPPDRRCIPQSWVCDGDVDCTDGYDENQNCTRRTCSENEFTC
GYGLCIPKIFRCDRHNDCGDYSDERGCLYQTCQQNQFTCQNGRCISKTFVCDEDNDCGDG
SDELMHLCHTPEPTCPPHEFKCDNGRCIEMMKLCNHLDDCLDNSDEKGCGINECHDPSIS
GCDHNCTDTLTSFYCSCRPGYKLMSDKRTCVDIDECTEMPFVCSQKCENVIGSYICKCAP
GYLREPDGKTCRONSNIEPYLIFSNRYYLRNLTIDGYFYSLILEGLDNVVALDFDRVEKR
LYWIDTQRQVIERMFLNKTNKETIINHRLPAAESLAVDWVSRKLYWLDARLDGLFVSDLN
GGHRRMLAQHCVDANNTFCFDNPRGLALHPQYGYLYWADWGHRAYIGRVGMDGTNKSVII
STKLEWPNGITIDYTNDLLYWADAHLGYIEYSDLEGHHRHTVYDGALPHPFAITIFEDTI
YWTDWNTRTVEKGNKYDGSNRQTLVNTTHRPFDIHVYHPYRQPIVSNPCGTNNGGCSHLC
LIKPGGKGFTCECPDDFRTLQLSGSTYCMPMCSSTQFLCANNEKCIPIWWKCDGQKDCSD
GSDELALCPQRFCRLGQFQCSDGNCTSPQTLCNAHQNCPDGSDEDRLLCENHHCDSNEWQ
CANKRCIPESWQCDTFNDCEDNSDEDSSHCASRTCRPGQFRCANGRCIPQAWKCDVDNDC
GDHSDEPIEECMSSAHLCDNFTEFSCKTNYRCIPKWAVCNGVDDCRDNSDEQGCEERTCH
PVGDFRCKNHHCIPLRWQCDGQNDCGDNSDEENCAPRECTESEFRCVNQQCIPSRWICDH
YNDCGDNSDERDCEMRTCHPEYFQCTSGHCVHSELKCDGSADCLDASDEADCPTRFPDGA
YCQATMFECKNHVCIPPYWKCDGDDDCGDGSDEELHLCLDVPCNSPNRFRCDNNRCIYSH
EVCNGVDDCGDGTDETEEHCRKPTPKPCTEYEYKCGNGHCIPHDNVCDDADDCGDWSDEL
GCNKGKERTCAENICEQNCTQLNEGGFICSCTAGFETNVFDRTSCLDINECEQFGTCPQH
CRNTKGSYECVCADGFTSMSDRPGKRCAAEGSSPLLLLPDNVRIRKYNLSSERFSEYLQD
EEYIQAVDYDWDPKDIGLSVVYYTVRGEGSRFGAIKRAYIPNFESGRNNLVQEVDLKLKY
VMQPDGIAVDWVGRHIYWSDVKNKRIEVAKLDGRYRKWLISTDLDQPAAIAVNPKLGLMF
WTDWGKEPKIESAWMNGEDRNILVFEDLGWPTGLSIDYLNNDRIYWSDFKEDVIETIKYD
GTDRRVIAKEAMNPYSLDIFEDQLYWISKEKGEVWKONKFGQGKKEKTLVVNPWLTQVRI
FHQLRYNKSVPNLCKQICSHLCLLRPGGYSCACPQGSSFIEGSTTECDAAIELPINLPPP
CRCMHGGNCYFDETDLPKCKCPSGYTGKYCEMAFSKGISPGTTAVAVLLTILLIVVIGAL
AIAGFFHYRRTGSLLPALPKLPSLSSLVKPSENGNGVTFRSGADLNMDIGVSGFGPETAI
DRSMAMSEDFVMEMGKQPIIFENPMYSARDSAVKVVQPIQVTVSENVDNKNYGSPINPSE
IVPETNPTSPAADGTQVTKWNLFKRKSKQTTNFENPIYAQMENEQKESVAATPPPSPSLP
AKPKPPSRRDPTPTYSATEDTFKDTANLVKEDSEV.

[0078] As used herein, “target sequence” refers to a contiguous portion of the nucleotide sequence of an mRNA molecule formed during the transcription of a gene of interest for example a CD320 gene or an LRP2 gene, including mRNA that is a product of RNA processing of a primary transcription product.

[0079] As used herein, the term “strand comprising a sequence” refers to an oligonucleotide comprising a chain of nucleotides that is described by the sequence referred to using the standard nucleotide nomenclature.

[0080] “G,” “C,” “A” and “U” each generally stand for a nucleotide that contains guanine, cytosine, adenine, and uracil as a base, respectively. “T” and “dT” are used interchangeably herein and refer to a deoxyribonucleotide wherein the nucleobase is thymine, e.g., deoxyribothymine, 2′-deoxythymidine or thymidine. However, it will be understood that the term “ribonucleotide” or “nucleotide” or “deoxyribonucleotide” can also refer to a modified nucleotide, as further detailed below, or a surrogate replacement moiety. The skilled person is well aware that guanine, cytosine, adenine, and uracil may be replaced by other moieties without substantially altering the base pairing properties of an oligonucleotide comprising a nucleotide bearing such replacement moiety. For example, without limitation, a nucleotide comprising inosine as its base may base pair with nucleotides containing adenine, cytosine, or uracil. Hence, nucleotides containing uracil, guanine, or adenine may be replaced in the nucleotide sequences of the invention by a nucleotide containing, for example, inosine. Sequences comprising such replacement moieties are embodiments of the invention.

[0081] The term “siRNA” refers to a compound, cocktail, composition or agent that contains RNA as that term is defined herein, and which mediates the targeted cleavage of an RNA transcript via the RISC/AGO (RNA-induced silencing complex) complex, whereby the guide strand of the siRNA hybridizes with its complementary mRNA molecule. The mRNA is degraded by the RISC/AGO complex, which has RNAse cleave activity, resulting in mRNA degradation and the protein encoded by the mRNA is not produced or is produced at a reduced level as compared to untreated cell. This causes the “knockdown” effect or reduced protein levels of the gene targeted by the siRNA compared to control treated cells. The siRNA modulates, e.g., inhibits, the expression of CD320 in a cell or LRP2 in a cell, e.g., a cell within a subject, such as a mammalian subject.

[0082] In one embodiment, an RNAi agent of the invention includes a single stranded RNA that interacts with a target RNA sequence, e.g., a CD320 or LRP2 target mRNA sequence, to direct the cleavage of the target RNA. Without wishing to be bound by theory, it is believed that long double stranded RNA introduced into cells is broken down into siRNA by a Type III endonuclease known as Dicer (Sharp et al. (2001) Genes Dev. 15:485). Dicer, a ribonuclease-III-like enzyme, processes the dsRNA into 19-23 base pair (bp) short interfering RNAs with characteristic two base 3′ overhangs (Bernstein, et al., (2001) Nature 409:363). Initially, the siRNAs may consist of two RNA strands, an antisense (or guide) strand and a sense (or passenger) strand, which form a duplex that varies in length from 10-80 bp in length with or without a 3′ nucleotide overhang. A dsRNA can include one or more single-stranded overhang(s) of one or more nucleotides. In one embodiment, at least one end of the dsRNA has a single-stranded nucleotide overhang of 1 to 4, generally 1 or 2 nucleotides. In another embodiment, the antisense strand of the dsRNA has 1-10 nucleotide overhangs each at the 3′ end and the 5′ end over the sense strand. In further embodiments, the sense strand of the dsRNA has 1-10 nucleotide overhangs each at the 3′ end and the 5′ end over the antisense strand.

[0083] The siRNA are then incorporated into an RNA-induced silencing complex (RISC) where one or more helicases unwind the siRNA duplex, enabling the complementary antisense (guide) strand to guide target recognition (Nykanen, et al., (2001) Cell 107:309). Upon binding to the appropriate target mRNA, one or more endonucleases within the RISC cleave the target to induce silencing (Elbashir, et al., (2001) Genes Dev. 15:188). Thus, in one aspect the invention relates to a single stranded RNA (siRNA) generated within a cell and which promotes the formation of a RISC complex to effect silencing of the target gene, i.e., a CD320 or LRP2 gene. Accordingly, the term “siRNA” is also used herein to refer to an RNAi as described above.

[0084] In another embodiment, the RNAi agent may be a single-stranded siRNA that is introduced into a cell or organism to inhibit a target mRNA. Single-stranded RNAi agents bind to the RISC endonuclease Argonaute 2, which then cleaves the target mRNA. The single-stranded siRNAs are generally 15-80 nucleotides and may be chemically modified to improve metabolic stability and activity; wherein one or multiple pyrimidine nucleotides could be modified as 2′-deoxy-2′-fluoronucleotides, one or more purine nucleotides could be modified as 2′-deoxypurine nucleotides and, moreover, wherein terminal cap modifications could be present at the 3′ or 5′ ends; particularly by the introduction of one or more 2′-deoxythymidine nucleotides, or by the introduction of one or more phosphorothioate groups linking any nucleotides in the sequence but especially at the 3′ and 5′ end. In addition, a 3′-terminal phosphate or vinylphosphonate group could be introduced. Examples of such modifications would include but not be limited to modifications to the ribose moieties of the nucleotides such as: 2′-deoxy, 2′-deoxyfluoro, 2′-methoxy (2′-O-methyl) (Hutvanger et al., (2004) PLOS Biol 2, 0465-0475; Janas et al., (2019) Nuc Acid Res 47, 3306-3320; Jackson et al., (2006) RNA 12, 1197-1205), and 2′-methoxyethyl, wherein it is understood that the stereochemistry of the 2′-substituent could be in the ribo- or arabino-orientation. Another modification could be 2′-trifluoromethoxy. Other modifications to the ribose moieties could include bridging modifications such that the 2′-carbon of the sugar moiety is covalently linked to the 4′-carbon of the sugar moiety by a methylene or methoxymethylene group to afford bridged nucleotides described in the art as LNA and (S)-cET, respectively (Corey et al., (2018) Nuc Acid Res 46; 1584-1600). In addition, the sugar moiety could be modified by removal of the bond between carbons C2′ and C3′ to afford “open” chain nucleotides analogous to those described in WO 2011/139843 A2. The ribose moiety of the RNA nucleotides could also be replaced by a morpholino group to afford PMO nucleotides. Modifications to the phosphate diester moieties of the nucleotides are also possible and could include but not be limited to replacement of the phosphodiester group by phosphorothioate and thio-phosphoramidate (Eckstein et al., (2014) Nuc Acid Therapeutics 24, 374-387). The ends of the strand could be modified with 2′-deoxynucleotides such as dT and, further, the dT nucleotides could be modified by phosphorothioate groups in place of diphosphate esters. The design and testing of single-stranded siRNAs are described in U.S. Pat. No. 8,101,348 and in Lima et al., (2012) Cell 150:883-894, the entire contents of each of which are hereby incorporated herein by reference. Any of the antisense nucleotide sequences described herein may be used as a single-stranded siRNA as described herein or as chemically modified by the methods described in Lima et al., (2012) Cell 150; 883-894.

[0085] In another embodiment, an “RNAi” for use in the compositions, uses, and methods of the invention is a double-stranded RNA and is referred to herein as a “double stranded RNAi agent,” “double-stranded RNA (dsRNA) molecule,” “dsRNA agent,” or “dsRNA”. The term “dsRNA” refers to a complex of ribonucleic acid molecules, having a duplex structure comprising two anti-parallel and substantially complementary nucleic acid strands, referred to as having “sense” (passenger) and “antisense” (guide) orientations with respect to a target RNA, i.e., a CD320 gene or LRP2 gene. In some embodiments of the invention, a double-stranded RNA (dsRNA) triggers the degradation of a target RNA, e.g., an mRNA, through a post-transcriptional gene-silencing mechanism referred to herein as RNA interference or RNAi.

[0086] In general, the majority of nucleotides of each strand of a dsRNA molecule are ribonucleotides, but as described in detail herein, each or both strands can also include one or more non-ribonucleotides, e.g., a deoxyribonucleotide and/or a modified nucleotide. In addition, as used in this specification, an “RNAi agent” may include ribonucleotides with chemical modifications (Corey et al., (2018) Nuc Acid Res 46; 1584-1600); an RNAi agent may include substantial modifications at multiple nucleotides or at a single nucleotide. Such modifications may include all types of modifications disclosed herein or known in the art. Any such modifications, as used in a siRNA type molecule, are encompassed by “RNAi agent” for the purposes of this specification and claims. Examples of such modifications would include but not be limited to modifications to the ribose moieties of the nucleotides such as: 2′-deoxy, 2′-deoxyfluoro, 2′-methoxy (2′-O-methyl) (Hutvanger et al., (2004) PLOS Biol 2, 0465-0475; Janas et al., (2019) Nuc Acid Res 47, 3306-3320; Jackson et al., (2006) RNA 12, 1197-1205), and 2′-methoxyethyl, wherein it is understood that the stereochemistry of the 2′-substituent could be in the ribo- or arabino-orientation. Another modification could be 2′-trifluoromethoxy. Other modifications to the ribose moieties could include bridging modifications such that the 2′-carbon of the sugar moiety is covalently linked to the 4′-carbon of the sugar moiety by a methylene or methoxymethylene group to afford bridged nucleotides described in the art as LNA and (S)-cET, respectively (Corey et al., (2018) Nuc Acid Res 46; 1584-1600). In addition, the sugar moiety could be modified by removal of the bond between carbons C2′ and C3′ to afford “open” chain nucleotides analogous to those described in WO 2011/139843 A2. The ribose moiety of the RNA nucleotides could also be replaced by a morpholino group to afford PMO nucleotides. Modifications to the phosphate diester moieties of the nucleotides are also possible and could include but not be limited to replacement of the phosphodiester group by phosphorothioate and thio-phosphoramidate (Eckstein et al., (2014) Nuc Acid Therapeutics 24, 374-387). The ends of the sense and antisense strands could be modified with 2′-deoxynucleotides such as dT and, further, the dT nucleotides could be modified by phosphorothioate groups in place of diphosphate esters (FIG. 19).

[0087] Chemical modifications to the ribonucleotides could be made at any individual or combination of nucleotides in the antisense and sense strands. In some cases, all the nucleotides in either the antisense or sense strand, or in both the antisense and sense strands are chemically modified (Allerson et al., (2005) J Med Chem 48, 901-904). In other cases, only some of the nucleotides in the antisense or sense strand, or in both the antisense and sense strands are chemically modified (Chiu et al., (2003) RNA 9, 1034-1048). In yet other cases, the modifications could follow a pattern of alternating 2′-methoxy and 2′-fluoro modifications to either or both strands of the siRNA and sometimes the complementary nucleotides of the antisense and sense strands could contain chemical modifications which are not identical, for example, where one member of a complementary nucleotide pair has a 2′-methoxy modification and the other member has a 2′-fluoro modification (Choung et al. (2006) Biochem Biophys Res Commun 342, 919-927; Hassler et al., (2018) Nucleic Acid Res 46, 2185-2196).

[0088] The two strands forming the duplex structure may be different portions of one larger RNA molecule, or they may be separate RNA molecules. Where the two strands are part of one larger molecule, and therefore are connected by an uninterrupted chain of nucleotides between the 3′-end of one strand and the 5′-end of the respective other strand forming the duplex structure, the connecting RNA chain is referred to as a “hairpin loop.” Where the two strands are connected covalently by means other than an uninterrupted chain of nucleotides between the 3′-end of one strand and the 5′-end of the respective other strand forming the duplex structure, the connecting structure is referred to as a “linker.” The RNA strands may have the same or a different number of nucleotides. The maximum number of base pairs is the number of nucleotides in the shortest strand of the dsRNA minus any overhangs that are present in the duplex. In addition to the duplex structure, an RNAi agent may comprise one or more nucleotide overhangs.

[0089] In one embodiment, an RNAi agent of the invention is a dsRNA of 20-30 nucleotides that interacts with a target RNA sequence, e.g., a CD320 target mRNA sequence or a LRP2 target mRNA sequence, to direct the cleavage of the target RNA.

[0090] The term “antisense strand” refers to the strand of a double stranded RNAi agent which includes a region that is substantially complementary to a target sequence (e.g., a human CD320 mRNA or a LRP2 mRNA). As used herein, the term “region complementary to part of an mRNA encoding CD320 or LRP2” refers to a region on the antisense strand that is substantially complementary to part of a mRNA sequence that codes for either CD320 or LRP2. Where the region of complementarity is not fully complementary to the target sequence, the mismatches are most tolerated in the terminal regions and, if present, are generally in a terminal region or regions, e.g., within 6, 5, 4, 3, or 2 nucleotides of the 5′ and/or 3′ terminus. For example, substantially complementary can in certain embodiments mean that in a hybridized pair of nucleobase sequences, at least 85% but not all of the bases in a contiguous sequence of a first polynucleotide will hybridize with the same number of bases in a contiguous sequence of a second polynucleotide.

[0091] The term “sense strand,” as used herein, refers to the strand of a dsRNA that includes a region that is substantially complementary to a region of the antisense strand.

[0092] As used herein, the term “cleavage region” refers to a region that is located immediately adjacent to the cleavage site. The cleavage site is the site on the target at which cleavage occurs. In some embodiments, the cleavage region comprises three bases on either end of, and immediately adjacent to, the cleavage site. In some embodiments, the cleavage region comprises two bases on either end of, and immediately adjacent to, the cleavage site. In some embodiments, the cleavage site specifically occurs at the site bound by nucleotides 10 and 11 of the antisense strand, and the cleavage region comprises nucleotides 11, 12 and 13.

[0093] As used herein, and unless otherwise indicated, the term “complementary,” when used to describe a first nucleotide sequence in relation to a second nucleotide sequence, refers to the ability of an oligonucleotide or polynucleotide comprising the first nucleotide sequence to hybridize and form a duplex structure under certain conditions with an oligonucleotide or polynucleotide comprising the second nucleotide sequence, as will be understood by the skilled person. Such conditions can, for example, be stringent conditions, where stringent conditions may include: 400 mM NaCl, 40 mM PIPES pH 6.4, 1 mM EDTA, 50° C. or 70° C. for 12-16 hours followed by washing. Other conditions, such as physiologically relevant conditions as may be encountered inside an organism, can apply. For example, a complementary sequence is sufficient to allow the relevant function of the nucleic acid to proceed, e.g., RNAi. The skilled person will be able to determine the set of conditions most appropriate for a test of complementarity of two sequences in accordance with the ultimate application of the hybridized nucleotides.

[0094] Sequences can be “fully complementary” with respect to each when there is base-pairing of the nucleotides of the first nucleotide sequence with the nucleotides of the second nucleotide sequence over the entire length of the first and second nucleotide sequences. However, where a first sequence is referred to as “substantially complementary” with respect to a second sequence herein, the two sequences can be fully complementary, or they may form one or more, but generally not more than 4, 3 or 2 mismatched base pairs upon hybridization, while retaining the ability to hybridize under the conditions most relevant to their ultimate application. However, where two oligonucleotides are designed to form, upon hybridization, one or more single stranded overhangs, such overhangs shall not be regarded as mismatches with regard to the determination of complementarity. For example, a dsRNA comprising one oligonucleotide 21 nucleotides in length and another oligonucleotide 23 nucleotides in length, wherein the longer oligonucleotide comprises a sequence of 21 nucleotides that is fully complementary to the shorter oligonucleotide, may yet be referred to as “fully complementary” for the purposes described herein.

[0095] “Complementary” sequences, as used herein, may also include, or be formed entirely from, non-Watson-Crick base pairs and/or base pairs formed from non-natural and modified nucleotides, in as far as the above requirements with respect to their ability to hybridize are fulfilled. Such non-Watson-Crick base pairs include, but are not limited to, G: U Wobble or Hoogstein base pairing.

[0096] The terms “complementary,” “fully complementary” and “substantially complementary” herein may be used with respect to the base matching between the sense strand and the antisense strand of a dsRNA, or between the antisense strand of a dsRNA and a target sequence, as will be understood from the context of their use.

[0097] As used herein, a polynucleotide that is “substantially complementary to at least part of” a messenger RNA (mRNA) refers to a polynucleotide that is substantially complementary to a contiguous portion of the mRNA of interest (e.g., an mRNA encoding CD320 or an mRNA encoding LRP2) including a 5′ UTR, an open reading frame (ORF), or a 3′ UTR. For example, a polynucleotide is complementary to at least a part of a CD320 mRNA or LRP2 mRNA if the sequence is substantially complementary to a non-interrupted portion of an mRNA encoding CD320 or LRP2.

[0098] The term “inhibiting,” as used herein, is used interchangeably with “reducing,” “silencing,” “downregulating,” “suppressing” and other similar terms, and includes any level of inhibition.

[0099] The phrase “inhibiting expression of a CD320,” “inhibiting expression of a LRP2” as used herein, includes inhibition of expression of any CD320 or LRP2 gene (such as the identified gene from, e.g., a mouse, a rat, a monkey, or a human) as well as variants, (e.g., naturally occurring variants), or mutants of the identified gene. Thus, the CD320 or LRP2 gene may be a wild-type CD320 or LRP2 gene, a mutant CD320 or LRP2 gene, or a transgenic CD320 or LRP2 gene in the context of a genetically manipulated cell, group of cells, or organism.

[0100] “Inhibiting expression of a CD320 gene” or “Inhibiting expression of a LRP2 gene” includes any level of inhibition of a CD320 gene or a LRP2 gene, e.g., at least partial suppression of the expression of a CD320 or LRP2 gene, such as an inhibition of at least about 5%, at least about 10%, at least about 15%, at least about 20%, at least about 25%, at least about 30%, at least about 35%, at least about 40%, at least about 45%, at least about 50%, at least about 55%, at least about 60%, at least about 65%, at least about 70%, at least about 75%, at least about 80%, at least about 85%, at least about 90%, at least about 91%, at least about 92%, at least about 93%, at least about 94%, at least about 95%, at least about 96%, at least about 97%, at least about 98%, or at least about 99%. In a preferred embodiment the inhibition is assessed by expressing the level of CD320 or LRP2 protein in treated cells as a percentage of the level of mRNA in control cells, using the following formula:
[0101] Normalized protein level for treated cells/Normalized protein level for control cells. The control cells are the negative control siRNA. Normalized means the protein level is normalized to the level of a housekeeping protein.

[0102] The expression of a CD320 or LRP2 gene may be assessed based on the level of any variable associated with CD320 or LRP2 gene expression, e.g., CD320 or LRP2 mRNA level, CD320 or LRP2 protein level. Inhibition may be assessed by a decrease in an absolute or relative level of one or more of these variables compared with a control level. The control level may be any type of control level that is utilized in the art, e.g., a pre-dose baseline level, or a level determined from a similar subject, cell, or sample that is untreated or treated with a control (such as, e.g., buffer only control or inactive agent control).

[0103] Contacting a cell with a RNAi agent, either ds or ss as used herein, includes contacting a cell by any possible means whether in vivo or in vitro. Contacting a cell with a RNAi agent includes contacting a cell in vitro with the RNAi agent or contacting a cell in vivo with the RNAi agent. The contacting may be done directly or indirectly. Thus, for example, the RNAi agent may be put into physical contact with the cell by the individual performing the method, or alternatively, the RNAi agent may be put into a situation that will permit or cause it to subsequently come into contact with the cell.

[0104] A “patient” or “subject,” as used herein, is intended to include either a human or non-human animal, preferably a mammal, e.g., a monkey. Most preferably, the subject or patient is a human.

[0105] A “CD320-associated disease,” as used herein, is intended to include any disease associated with a perturbation of the CD320 gene, or protein, polymorphisms, single nucleotide polymorphisms (SNPs) as well as epigenetic modifications of the CD320 gene. Such a disease may be caused, for example, by excess production of the CD320 protein, by CD320 gene mutations, by abnormal cleavage of the CD320 protein, by abnormal folding of the CD320 protein, by abnormal interactions between CD320 itself or with other proteins or other endogenous or exogenous substances. For example, cancer may be a CD320-associated disease. The degree of inhibition of protein expression may be measured by western blotting.

[0106] A “LRP2-associated disease,” as used herein, is intended to include any disease associated with a perturbation of the LRP2 gene, protein, polymorphisms, SNPs as well as epigenetic modifications of the CD320 gene. Such a disease may be caused, for example, by excess production of the LRP2 protein, by LRP2 gene mutations, by abnormal cleavage of the LRP2 protein, by abnormal folding of the LRP2 protein, by abnormal interactions between LRP2 molecules and other proteins or other endogenous or exogenous substances. For example, cancer may be a LRP2-associated disease. The degree of inhibition of protein expression may be measured by western blotting.

[0107] “Therapeutically effective amount,” as used herein, is intended to include the amount of an RNAi agent that, when administered to a cell or a patient for treating a CD320 associated disease or a LRP2 associated disease, is sufficient to effect treatment of the disease (e.g., by diminishing, ameliorating or maintaining the existing disease or one or more symptoms of disease or by preferentially causing the death of a disease cell as compared to a non-disease cell). The “therapeutically effective amount” may vary depending on the RNAi agent, how the agent is administered, the disease and its severity and the history, age, weight, family history, genetic makeup, stage of pathological processes mediated by CD320 or LRP2 expression, the types of preceding or concomitant treatments, if any, and other individual characteristics of the patient to be treated.

[0108] “Prophylactically effective amount,” as used herein, is intended to include the amount of an RNAi agent that, when administered to a subject who does not yet experience or display symptoms of a CD320 associated disease or a LRP2 associated disease, but who may be predisposed to the disease, is sufficient to prevent or ameliorate the disease or one or more symptoms of the disease. Ameliorating the disease includes slowing the course of the disease or reducing the severity of later-developing disease. The “prophylactically effective amount” may vary depending on the RNAi agent, how the agent is administered, the degree of risk of disease, and the history, age, weight, family history, genetic makeup, the types of preceding or concomitant treatments, if any, and other individual characteristics of the patient to be treated.

[0109] A “therapeutically-effective amount” or “prophylactically effective amount” also includes an amount of an RNAi agent that produces some desired local or systemic effect at a reasonable benefit/risk ratio applicable to any treatment. RNAi agents employed in the methods of the present invention may be administered in a sufficient amount to produce a reasonable benefit/risk ratio applicable to such treatment.

### Pharmaceutical Compositions

[0110] The methods described herein include administration of a LRP2 inhibiting composition and/or a CD320 inhibiting composition, e.g., a first siRNA targeting a CD320 gene and/or a second siRNA targeting a LRP2 gene. In some embodiments, the LRP2 inhibiting composition and/or the CD320 inhibiting composition is a pharmaceutical composition.

[0111] The methods described herein also include administration of one or multiple LRP2 inhibiting compositions and/or one or multiple CD320 inhibiting compositions, e.g., one or more siRNAs targeting a CD320 gene and/or one or more siRNAs targeting an LRP2 gene. It is understood that such compositions could be chemically modified in a variety of ways and that such modifications need not be identical in compositional mixtures. In some embodiments, the LRP2 inhibiting composition and/or the CD320 inhibiting composition is a pharmaceutical composition.

[0112] The pharmaceutical compositions of the present invention may be administered in a number of ways depending upon whether local or systemic treatment is desired and upon the area to be treated. Administration may be topical, pulmonary, e.g., by inhalation or insufflation of powders or aerosols, including by nebulizer; intratracheal, intranasal, epidermal and transdermal, oral or parenteral. Parenteral administration includes intravenous, intraarterial, subcutaneous, intraperitoneal or intramuscular injection or infusion; or intracranial, e.g., intraparenchymal, intrathecal or intraventricular, administration.

[0113] The compositions can be delivered in a manner to target a particular tissue, such as the lung cells or breast cells or brain cells or bladder cells or uterine cells or cervix cells or prostate cells. Pharmaceutical compositions can be delivered by injection directly into the brain. The injection can be by stereotactic injection into a particular region of the brain (e.g., the substantia nigra, cortex, hippocampus, striatum, or globus pallidus), or the dsRNA can be delivered into multiple regions of the central nervous system (e.g., into multiple regions of the brain, and/or into the spinal cord). The dsRNA can also be delivered into diffuse regions of the brain (e.g., diffuse delivery to the cortex of the brain). In general siRNAs are administered 1) by intratumoral injection, 2) by systemic injection, 3) by slow release from an implanted polymer. Other tissue specificity could be achieved by antibody or small molecule conjugation, or by a tissue-specific delivery device (e.g., a catheter can be used to deliver to the bladder).

[0114] In one embodiment, an RNAi targeting either LRP2 or the CD320 can be delivered by way of a cannula or other delivery device having one end implanted in a tissue. The cannula can be connected to a reservoir of the RNAi composition. The flow or delivery can be mediated by a pump, e.g., an osmotic pump or minipump. In one embodiment, a pump and reservoir are implanted in an area distant from the tissue, e.g., in the abdomen, and delivery is affected by a conduit leading from the pump or reservoir to the site of release.

[0115] Accordingly, in some embodiments, the pharmaceutical compositions described herein comprise one or more pharmaceutically acceptable excipients. The pharmaceutical compositions described herein are formulated for administration to a subject.

[0116] As used herein, a pharmaceutical composition or medicament includes a pharmacologically effective amount of at least one of the described RNAi agents and one or more pharmaceutically acceptable excipients. Pharmaceutically acceptable excipients (excipients) are substances other than the Active Pharmaceutical Ingredient (API, therapeutic product, e.g., CD320 RNAi agent or LRP2 RNAi agent) that are intentionally included in the drug delivery system. Excipients do not exert or are not intended to exert a therapeutic effect at the intended dosage. Excipients can act to a) aid in processing of the drug delivery system during manufacture, b) protect, support, or enhance stability, bioavailability or patient acceptability of the API, c) assist in product identification, and/or d) enhance any other attribute of the overall safety, effectiveness, of delivery of the API during storage or use. A pharmaceutically acceptable excipient may or may not be an inert substance.

[0117] Excipients include, but are not limited to: absorption enhancers, anti-adherents, anti-foaming agents, anti-oxidants, binders, buffering agents, carriers, coating agents, colors, delivery enhancers, delivery polymers, dextran, dextrose, diluents, disintegrants, emulsifiers, extenders, fillers, flavors, glidants, humectants, lubricants, oils, polymers, preservatives, saline, salts, solvents, sugars, suspending agents, sustained release matrices, sweeteners, thickening agents, tonicity agents, vehicles, water-repelling agents, and wetting agents.

[0118] Pharmaceutical compositions suitable for injectable use include sterile aqueous solutions (where water soluble) or dispersions and sterile powders for the extemporaneous preparation of sterile injectable solutions or dispersions. For intravenous administration, suitable carriers include physiological saline, bacteriostatic water, Cremophor® ELTM (BASF, Parsippany, N.J.) or phosphate buffered saline (PBS). The composition, understood to include formulations and drug delivery systems, should be stable under the conditions of manufacture and storage and should be preserved against the contaminating action of microorganisms such as bacteria and fungi. The carrier can be a solvent or dispersion medium containing, for example, water, ethanol, polyol (for example, glycerol, propylene glycol, and liquid polyethylene glycol), and suitable mixtures thereof. The proper fluidity can be maintained, for example, by the use of a coating such as lecithin, by the maintenance of the required particle size in the case of dispersion and by the use of surfactants. In many cases, it will be preferable to include isotonic agents, for example, sugars, polyalcohols such as mannitol, sorbitol, and sodium chloride in the composition. Prolonged absorption of the injectable compositions can be brought about by including in the composition an agent which delays absorption, for example, aluminum monostearate and gelatin.

[0119] Sterile injectable solutions can be prepared by incorporating the active compound in the required amount in an appropriate solvent with one or a combination of ingredients enumerated above, as required, followed by filter sterilization. Generally, dispersions are prepared by incorporating the active compound into a sterile vehicle, which contains a basic dispersion medium and the required other ingredients from those enumerated above. In the case of sterile powders for the preparation of sterile injectable solutions, methods of preparation include vacuum drying and freeze-drying which yields a powder of the active ingredient plus any additional desired ingredient from a previously sterile-filtered solution thereof.

[0120] Formulations suitable for intra-articular administration can be in the form of a sterile aqueous preparation of the drug that can be in microcrystalline form, for example, in the form of an aqueous microcrystalline suspension. Liposomal formulations or biodegradable polymer systems can also be used to present the drug for both intra-articular and ophthalmic administration.

[0121] The active compounds can be prepared with carriers that will protect the compound against rapid elimination from the body, such as a controlled release formulation, including implants and microencapsulated delivery systems. Biodegradable, biocompatible polymers can be used, such as ethylene vinyl acetate, polyanhydrides, polyglycolic acid, collagen, polyorthoesters, and polylactic acid. Methods for preparation of such formulations will be apparent to those skilled in the art. Liposomal suspensions can also be used as pharmaceutically acceptable carriers. These can be prepared according to methods known to those skilled in the art, for example, as described in U.S. Pat. No. 4,522,811.

### Dosage and Timing

[0122] The skilled artisan will appreciate that certain factors may influence the dosage and timing required to effectively treat a subject, including but not limited to the severity of the disease or disorder, previous treatments, the general health and/or age of the subject, and other diseases present. Moreover, treatment of a subject with a therapeutically effective amount of a composition can include a single treatment or a series of treatments. Estimates of effective dosages and in vivo half-lives for the LRP2 inhibiting composition and or the CD320-inhibiting compositions encompassed by the invention can be made using conventional methodologies or on the basis of in vivo testing using an appropriate animal model, as described elsewhere herein.

[0123] In general, a suitable dose of a pharmaceutical composition of the LRP2 inhibiting composition and/or the CD320-inhibiting composition will be in the range of 0.01 to 300.0 milligrams per kilogram body weight of the recipient per day, generally in the range of 1 to 50 mg per kilogram body weight per day.

[0124] For example, the LRP2 inhibiting composition and/or the CD320-inhibiting composition can be an siRNA composition of one or more siRNAs, and can be administered at, 0.01 mg/kg, 0.05 mg/kg, 0.2 mg/kg, 0.3 mg/kg, 0.4 mg/kg, 0.5 mg/kg, 0.6 mg/kg, 0.7 mg/kg, 0.8 mg/kg, 0.9 mg/kg, 1 mg/kg, 1.1 mg/kg, 1.2 mg/kg, 1.3 mg/kg, 1.4 mg/kg, 1.5 mg/kg, 1.628 mg/kg, 2 mg/kg, 3 mg/kg, 5.0 mg/kg, 10 mg/kg, 20 mg/kg, 30 mg/kg, 40 mg/kg, 50 mg/kg, 100 mg/kg, 200 mg/kg, 400 mg/kg per single dose. In another embodiment, the dosage is between 0.15 mg/kg and 0.3 mg/kg. For example, the LRP2 and/or the CD320-inhibiting composition can be administered at a dose of 0.15 mg/kg, 0.2 mg/kg, 0.25 mg/kg, or 0.3 mg/kg. In an embodiment, the LRP2 and/or the CD320-inhibiting composition is administered at a dose of 0.3 mg/kg.

[0125] The pharmaceutical composition may be administered once daily, or once or twice every 5, 10, 15, 20, 21, 22, 23, 24, 25, 26, 27, 28, 29, or 30 days. The dosage unit can be compounded for delivery over several days, e.g., using a conventional sustained release formulation which provides sustained release of the LRP2 inhibiting composition and/or the CD320-inhibiting composition over a several day period. Sustained release formulations are well known in the art and are particularly useful for delivery of agents at a particular site, such as could be used with the agents of the present invention.

[0126] In an embodiment, the LRP2-inhibiting composition and/or the CD320-inhibiting composition is dependent upon the tumor cell line, and the dosage is 0.3 mg/kg, and wherein the dose is administered once every 21 days. In another embodiment, the effective amount is 0.3 mg/kg and the effective amount is administered once every 21 days via a 70 minute infusion of 1 mL/min for 15 minutes followed by 3 mL/min for 55 minutes. In another embodiment, the effective amount is 0.3 mg/kg and the effective amount is administered at two doses every 21-28 days via a 60 minute infusion of 3.3 mL/min, or via a 70 minute infusion of 1.1 mL/min for 15 minutes followed by 3.3 mL/min for 55 minutes

[0127] A dosage of a LRP2-inhibiting composition and/or the CD320-inhibiting composition can be adjusted for treatment

[0128] A LRP2-inhibiting composition and/or the CD320-inhibiting composition can be administered in combination with other known agents effective in treatment of pathological processes mediated by target gene expression.

[0129] In another embodiment, the pharmaceutical composition is formulated for administration according to a dosage regimen described herein, e.g., not more than once every four weeks, not more than once every three weeks, not more than once every two weeks, or not more than once every week. In another embodiment, the administration of the pharmaceutical composition can be maintained for a month or longer, e.g., one, two, three, or six months, or one year or longer.

[0130] In embodiments of the pharmaceutical compositions described herein, the RNAi (e.g., dsRNA) is administered with a buffer solution. In embodiments, the buffer solution comprises acetate, citrate, prolamine, carbonate, or phosphate or any combination thereof. In embodiments, the buffer solution is phosphate buffered saline (PBS).

[0131] In embodiments of the pharmaceutical compositions described herein, the composition is administered intravenously.

[0132] In embodiments of the pharmaceutical compositions described herein, the composition is administered subcutaneously.

[0133] In certain embodiments, a pharmaceutical composition, e.g., a composition described herein, includes a lipid formulation. In embodiments, the composition is administered intravenously.

[0134] In some embodiments, a pharmaceutical composition, e.g., a composition described herein, includes a cationic polyamine formulation or nanoparticle (e.g., JetPEI). In some embodiments, the composition is administered intravenously.

[0135] In another embodiment, the pharmaceutical composition is formulated for administration according to a dosage regimen described herein, e.g., not more than once every four weeks, not more than once every three weeks, not more than once every two weeks, or not more than once every week. In another embodiment, the administration of the pharmaceutical composition can be maintained for a month or longer, e.g., one, two, three, or six months, or one year or longer.

[0136] In another embodiment, a composition containing an RNAi agent featured in the invention, e.g., a dsRNA targeting LRP2 or CD320, is administered with a non-RNAi therapeutic agent, such as an agent known to treat a cancer such as lung cancer. In another embodiment, a composition containing an RNAi agent featured in the invention, e.g., a dsRNA targeting LRP2 and/or CD320, is administered along with a non-RNAi therapeutic regimen, such as radiation, chemotherapy, immunotherapy, photodynamic therapy or a combination thereof.

[0137] In an aspect provided herein is a method of inhibiting LRP2 and/or CD320 expression in a cell, the method comprising: (a) introducing into the cell an RNAi agent (e.g., a dsRNA) described herein and (b) maintaining the cell of step (a) for a time sufficient to obtain degradation of the mRNA transcript of an LRP2 gene and/or CD320 gene, thereby inhibiting expression of the LRP2 gene and/or CD320 gene in the cell.

[0138] In an aspect provided herein is a method for reducing or inhibiting the expression of LRP2 gene and/or CD320 genes in a cell. The method includes: (a) introducing into the cell one or more complimentary double-stranded ribonucleic acid (dsRNA) molecules, in which one sequence is designated the sense strand and the other sequence the anti-sense strand, and wherein the anti-sense strand has significant complementarity to a portion of mRNA encoding for LRP2 or CD320. The complimentary region is 15-30 nucleotides in length, and generally 19-24 nucleotides in length, and the dsRNA, upon entering a cell expressing LRP2 and/or CD320, inhibits the expression of the LRP2 protein and/or CD320 protein by at least 10%, e.g., at least 20%, at least 30%, at least 40% or more; (b) single or repeated treatment of the cell with dsRNAs, as described in part (a), so as to maintain the inhibition of LRP2 and/or CD320 protein expression over a desired period of time by at least 10%, e.g., at least 20%, at least 30%, at least 40% or more.

[0139] In embodiments of the foregoing methods of inhibiting LRP2 and/or CD320 expression in a cell, the cell is treated ex vivo, in vitro, or in vivo. In embodiments, the cell is a melanoma, glioblastoma, lung carcinoma, triple negative breast carcinoma, renal carcinoma, pancreatic carcinoma, hepatocellular carcinoma, ovarian carcinoma and prostate carcinoma.

[0140] In some embodiments, the cell is present in a subject in need of treatment, prevention and/or management of a CD320-associated disease or a LRP2-associated disease.

[0141] In embodiments, the expression of LRP2 and/or CD320 is inhibited by at least 30%.

[0142] In embodiments, the RNAi (e.g., dsRNA) has an IC₅₀ in the range of 0.01-50 nM.

[0143] In embodiments, the RNAi (e.g., dsRNA) has an IC₅₀ in the range of 0.01-1 nM.

[0144] In certain embodiments, the cell is a mammalian cell (e.g., a human, non-human primate, or rodent cell).

[0145] In one embodiment, the cell is treated ex vivo, in vitro, or in vivo (e.g., the cell is present in a subject (e.g., a patient in need of treatment, prevention and/or management of a disorder related to LRP2 and/or CD320 expression).

[0146] In one embodiment, the subject is a mammal (e.g., a human) at risk, or diagnosed with a proliferation disorder.

[0147] In embodiments, the RNAi (e.g., dsRNA) is formulated as an lipid nanoparticle (LNP) polyplex (polyamine) formulation.

[0148] In embodiments, RNAi (e.g., dsRNA) is administered at a dose of 0.05001-500.01 mg/kg.

[0149] In embodiments, the RNAi (e.g., dsRNA) is administered at a concentration of 0.01 mg/kg-50.1 mg/kg bodyweight of the subject.

[0150] In embodiments, the RNAi (e.g., dsRNA) is formulated as an LNP formulation and is administered at a dose of 0.050.1-50.5 mg/kg.

[0151] In embodiments, the RNAi (e.g., dsRNA) has an IC₅₀ in the range of 0.01-10 nM.

[0152] In embodiments, the RNAi (e.g., dsRNA) or composition comprising the RNAi is administered according to a dosing regimen. In embodiments, the RNAi (e.g., dsRNA) or composition comprising the RNAi is administered as a single dose or at multiple doses, e.g., according to a dosing regimen.

[0153] The term “sample,” as used herein, includes a collection of fluids, cells, or tissues isolated from a subject, as well as fluids, cells, or tissues present within a subject. Examples of biological fluids include blood, serum and serosal fluids, plasma, cerebrospinal fluid, ocular fluids, lymph, urine, saliva, and the like. Tissue samples may include samples from tissues, organs or localized regions. For example, samples may be derived from particular organs, parts of organs, or fluids or cells within those organs. In certain embodiments, samples may be derived from a tumor. In preferred embodiments, a “sample derived from a subject” refers to blood or plasma drawn from the subject. In further embodiments, a “sample derived from a subject” refers to tissue biopsy derived from the subject.

[0154] In one embodiment, an RNAi (e.g., a dsRNA) featured herein includes a first sequence of a dsRNA that is selected from the group consisting of the sense sequences of Table 1 and a second sequence that is selected from the group consisting of the corresponding antisense sequences of Table 1. It is understood that the suffix A (e.g., OSC17A) represents the antisense strand whereas the suffix S (e.g., OSC17S) represents the sense strand. In those instances when we refer to an siRNA with no suffix (e.g., OSC17), we mean that to indicate the dsRNA comprised of the antisense and sense strands corresponding to that number (e.g., OSC17A paired with OSC17S).

[0155] In some embodiments the RNAi is from about 15 to about 25 nucleotides in length, and in other embodiments the RNAi is from about 25 to about 30 nucleotides in length. An RNAi targeting CD320, upon contact with a cell expressing CD320, inhibits the expression of a CD320 gene by at least 10%, at least 20%, at least 25%, at least 30%, at least 35% or at least 40% or more, such as when assayed by a method as described herein. In one embodiment, the RNAi targeting CD320 is formulated in a stable nucleic acid lipid particle (SNALP).

[0156] In some embodiments the RNAi is from about 15 to about 25 nucleotides in length, and in other embodiments the RNAi is from about 25 to about 30 nucleotides in length. An RNAi targeting LRP2, upon contact with a cell expressing LRP2, inhibits the expression of a LRP2 gene by at least 10%, at least 20%, at least 25%, at least 30%, at least 35% or at least 40% or more, such as when assayed by a method as described herein. In one embodiment, the RNAi targeting LRP2 is formulated in a stable nucleic acid lipid particle (SNALP).

[0157] In some embodiments the RNAi is from about 15 to about 25 nucleotides in length, and in other embodiments the RNAi is from about 25 to about 30 nucleotides in length. An RNAi targeting CD320, upon contact with a cell expressing CD320, inhibits the expression of a CD320 gene by at least 10%, at least 20%, at least 25%, at least 30%, at least 35% or at least 40% or more, such as when assayed by a method as described herein. In one embodiment, the RNAi targeting CD320 is formulated as a complex, which may exist as a nanoparticle, with a cationic polyamine.

[0158] In some embodiments the RNAi is from about 15 to about 25 nucleotides in length, and in other embodiments the RNAi is from about 25 to about 30 nucleotides in length. An RNAi targeting LRP2, upon contact with a cell expressing LRP2, inhibits the expression of a LRP2 gene by at least 10%, at least 20%, at least 25%, at least 30%, at least 35% or at least 40% or more, such as when assayed by a method as described herein. In one embodiment, the RNAi targeting LRP2 is formulated as a complex, which may exist as a nanoparticle, with a cationic polyamine.

[0159] Referring now to Table 1-DNA sequences are illustrated, which are subsequently transcribed into shRNA, which hence targets the CD320 or LRP2 mRNA for destruction in the cell. shRNA sequences used in lentiviral vectors illustrates the sequences that were used to target the CD320 sequence coding for the CD320 protein and the LRP2 sequence coding for the LRP2 protein. The Each vector that carried a shRNA coding sequence also contained a unique drug resistance gene which would allow for selecting those cells that had taken up the shRNA as those cells that had not taken up the shRNA having the unique drug resistance gene would not survive. On day 2, drug selection was started. On day 3, the cells were harvested and plated in a new dish. Only the cells with a drug resistance gene, i.e., those cells that had taken up shRNA virus particles would survive this re-plating procedure. From day 4 on, each culture was closely observed for cell growth. The cells that were infected with the irrelevant control shRNA kept on growing as expected (since the shRNA was essentially a non-functional shRNA)—data not shown. The results for the cell lines that took up the CD320+LRP2 shRNAs are shown in Table 1.

TABLE 1

| | | | Anti-Sense | Location |
|---|---|---|---|---|
| Name | Target | Sense Sequence | Sequence | in DNA |
| shScramble | non-targeting | CCTAAGGTTAAGTC | CGAGGGCGACTTAAC | N/A |
| | control | GCCCTCG | CTTAGG | |
| | | (SEQ ID NO. 941) | (SEQ ID NO. 942) | |
| shCD320-#27 | CD320 | CCCTCAGAGACCTG | AAGAGCTCAGGTCTC | 1006- |
| | (NM_016579.3) | AGCTCTT | TGAGGG | 1026 |
| | | (SEQ ID NO. 943) | (SEQ ID NO. 944) | |
| shLRP2-#89 | LRP2 | CCTGTAATAAACAC | AAGAGTAGTGTTTAT | 2800- |
| | (NM_004525.2) | TACTCTT | TACAGG | 2820 |
| | | (SEQ ID NO. 945) | (SEQ ID NO. 946) | |

[0160] The preliminary studies show that cancer cells are selectively killed by CD320 and LRP2 knockdown, while normal cells remain unaffected (Table 2).

[0161] Table 2 shows the effect of simultaneous knockdown of CD320 and LRP2 on cell viability.

TABLE 2

| | | Outcome of CD320/LRP2 | |
|---|---|---|---|
| | | knockdown | |
| | | Cell arrest/death | Alive |
| Cancer (Lung) | HCC15 | √ | |
| | H157 | √ | |
| | H358 | √ | |
| | H1999 | √ | |
| Non-cancer | Normal fibroblast | | √ |
| | LDLR mutant fibroblast | | √ |

[0162] Additional cancer cell lines were also treated with the compounds described herein to determine whether cancer cell lines were more susceptible to growth inhibition and toxicity as compared to non-cancer cells of the same origin. Cell lines from skin, prostate, and brain cancers were screened similarly to the experimental outline in FIG. 1. Table 3 summarizes the effects of simultaneous knockdown of CD320 and LRP2 in cancer and normal cells.

TABLE 3

| | | | | shCD320 + | |
|---|---|---|---|---|---|
| Cell | shSCR | shCD320 | shLRP2 | shLRP2 | Comments |
| Normal cells | | | | | |
| GM05659 | +++ | +++ | +++ | +++ | no effect of knockdown |
| GM00701 | +++ | ++ | +++ | +++ | cells grow very slow; hard to determine |
| | | | | | if any affect of knockdown |
| SAEC | pending | | | | |
| Lung cells | | | | | |
| HCC15 | +++ | + | + | + | cells strongly affected by knockdown |
| H157 | +++ | + | ++ | + | senescent phenotype |
| H358 | +++ | ++ | ++ | ++ | morphology changes; cells rounded |
| H1993 | +++ | ++ | ++ | + | cells rounded; morphology change |
| Melanoma Cells | | | | | |
| MDA-MB-4353 | +++ | ++ | + | + | morphology change; cells strongly affected |
| | | | | | by double knockdown |
| Prostate cells | | | | | |
| LncAP | +++ | ++ | ++ | + | cells rounded; morphology change |
| PC3 | +++ | +++ | ++ | +++ | cells minimally to not affected by knockdown |
| DU-145 | +++ | ++ | + | ++ | cells modestly affected by knockdown |
| Glioblastoma | | | | | |
| A172 | +++ | + | + | 0 | cells strongly affected by knockdown |
| U251MG | +++ | + | ++ | 0 | cells strongly affected by knockdown |
| U343 | +++ | +++ | ++ | +++ | cells modestly affected by LRP2 knockdown |
| T98G | +++ | +++ | ++ | ++ | cells slightly affected by knockdown |

+++ cells unaffected compared to shSCR (control)
++ cells modestly affected compared to shSCR (control)
+ cells significantly affected compared to shSCR (control)
0 vast majority of cells killed compared to shSCR (control)

[0163] The screening results showed that lung, prostate, skin, and brain cancer cell lines were growth-inhibited or killed by the simultaneous knockdown (“double knockdown”) of CD320 and LRP2, while non-cancerous cells were unaffected.

[0164] Referring now to FIG. 2, representative pictures of the cells were taken to record their phenotypes after the double knockdown of CD320 and LRP2 and to illustrate the sensitivity of cancer cell lines to knockdown of the expression of CD320 and LRP2 proteins.

[0165] Normal cells (GM05659 fibroblasts) or cancer cells were infected with lentiviruses expressing shRNAs to control sequences or to shCD320 and shLRP2 as described in FIG. 1. The cells were grown as described in FIG. 1. On the ninth day after transfection with the lentiviruses, pictures of the cells were taken. The solid line ovals indicate healthy growth of normal fibroblast infected with shRNAs to CD320 and LRP2. The broken line ovals indicate unhealthy dying cells of cancer cell lines infected with shRNAs to CD320 and LRP2.

[0166] These results support use of the compounds as therapeutics based upon decreasing expression of CD320 and LRP2 protein preferentially resulting in detrimental effects in cancer cells as compared to non-cancer cells. The original experiments were conducted using shRNAs delivered by lentiviral vectors. Short inhibitory RNAs (siRNAs), having a sequence complimentary to a portion of the CD320 protein and/or the LRP2 protein were designed. The siRNAs can be chemically modified to increase their stability and potency and reduce their immunogenicity, and multiple platforms exist for their delivery in clinical applications.

[0167] siRNA sequences that efficiently knock down the protein levels of LRP2 and/or CD320 were designed and identified. Table 4 is a list of siRNA sequences complementary to mRNA for CD320 or LRP2 that were tested for their ability to knock down CD320 or LRP2 protein, respectively (see FIG. 3, FIG. 4, FIG. 5, FIG. 12, and FIG. 15).

TABLE 4

| | | | | Nucleotide | |
|---|---|---|---|---|---|
| ID | Passenger Sequence | Target | Size | start site | Location |
| OSS1 | CCUAAGGUUAAGUCGCCCUCG | none | 21 | N/A | N/A |
| | (SEQ ID NO. 947) | | | | |
| OSS2 | UGGUUUACAUGUUGUGUGA | none | 19 | N/A | N/A |
| | (SEQ ID NO. 948) | | | | |
| OSL231 | GGGCUCUAGGUUUGGUGCUAU | LRP2 | 25 | 12537 | CDS |
| | CAAA (SEQ ID NO. 949) | NM_004525.2 | | | |
| OSL245 | GGACUGAUAGGAGAGU | LRP2 | 25 | 12995 | CDS |
| | CAUUGCAAA (SEQ ID NO. 950) | NM_004525.2 | | | |
| OSL47 | CCUGUAAUAAACACUACUCUU | LRP2 | 21 | 2800 | CDS |
| | (SEQ ID NO. 951) | NM_004525.2 | | | |
| OSL104 | CCUUCUAUGAACCUGGCCUUA | LRP2 | 21 | 5677 | CDS |
| | (SEQ ID NO. 952) | NM_004525.2 | | | |
| OSL90 | GUGAUUUGAUUAUACGGCA | LRP2 | 19 | 5126 | CDS |
| | (SEQ ID NO. 953) | NM_004525.2 | | | |
| OSL119 | CCUCAAAUGGCUGUAGCAA | LRP2 | 19 | 6266 | CDS |
| | (SEQ ID NO. 954) | NM_004525.2 | | | |
| OSC17 | GAACUGACAAGAAACUGCGCAACUG | CD320 | 25 | 422 | CDS |
| | (SEQ ID NO. 955) | NM_016579.3 | | | |
| OSC47 | CCCUCAGAGACCUGAGCUCUU | CD320 | 21 | 1006 | 3'-UTR |
| | (SEQ ID NO. 956) | NM_016579.3 | | | |

[0168] The list of all potential siRNA sequences is quite large. We have identified 340 potential SIRNA sequences to LRP2 and 59 potential siRNA sequences to CD320. (See Table 5 and Table 6 for the complete list and Table 5A and Table 6A identify the target position and sequence that is complementary for each antisense sequence identified). In addition, chemical modifications can be made to these siRNA sequences to improve their stability and reduce their off-target effects. siRNA molecules are vulnerable to metabolic degradation, for example by RNase or DNase enzymes. Chemical modification of siRNA molecules by incorporation of one or more unnatural, that is, manmade, nucleotides within the sequence can render siRNAs resistant to such metabolic degradation and increase their biological half-life in the cell or in plasma. Moreover, the inclusion of manmade nucleotides at strategic locations within the siRNA sequence can decrease the immunogenicity of the siRNA and improve the selectivity for the guide strand over the passenger strand. Modified siRNA molecules may incorporate manmade nucleotides of a single type or may include multiple manmade nucleotides of different types. Manmade nucleotides may include, but are not limited to, those which contain chemical modifications to the ribose moiety or to the phosphate moieties (FIG. 19 and Table 7). Examples of manmade nucleotides include, but are not limited to, the structures shown in the Table 7. Moreover, modification of multiple structural elements may be combined. In addition, modification may be made to the nucleobase B, which, in addition to the natural RNA nucleobases (G, C, A, U), may include unnatural bases, such as those containing a sulfur atom (e.g., thiouracil).

TABLE 7
Nucleotide modifications corresponding to FIG. 19A

| | | | | | | B |
|---|---|---|---|---|---|---|
| Designation^{a} | Y | X | Z | R | R′ | (nucleobase) |
| [2fN] | O | O | O | F | H | G, C, A, U, |
| | | | | | | other |
| 2′-FANA | O | O | O | H | F | G, C, A, U, |
| | | | | | | other |
| [mN] | O | O | O | OMe | H | G, C, A, U, |
| | | | | | | other |
| 2′-MOE | O | O | O | CH₂CH₂OMe | H | G, C, A, U, |
| | | | | | | other |
| 2′-EA | O | O | O | CH₂CH₂NH₂ | H | G, C, A, U, |
| | | | | | | other |
| 2′-DMEA | O | O | O | CH₂CH₂NMe₂ | H | G, C, A, U, |
| | | | | | | other |
| 2′-DMAP | O | O | O | CH₂CH₂CH₂NMe₂ | H | G, C, A, U, |
| | | | | | | other |
| * as in N1*N2 | O | S | O | OH | H | G, C, A, U, |
| | | | | | | other |
| ** as in N1**N2 | S | S | O | OH | H | G, C, A, U, |
| | | | | | | other |
| 2′-deoxy | O | O | O | H | H | G, C, A, U, |
| | | | | | | other |
| 4′-S | O | O | S | H | H | G, C, A, U, |
| | | | | | | other |
| F-SRNA | O | O | S | F | H | G, C, A, U, |
| | | | | | | other |
| Me-SRNA | O | O | S | OMe | H | G, C, A, U, |
| | | | | | | other |
| 4′-S-FANA | O | O | S | H | F | G, C, A, U, |
| | | | | | | other |

^{a}N designates an arbitrary ribonucleotide or deoxyribonucleotide or analogs thereof.

[0169] In some embodiments, chemical modification is made to the phosphodiester group which covalently connects two nucleotides, such that, for example, one or two oxygen atoms in that group are substituted with sulfur atoms, as indicated by a single or double asterisk between two nucleotides to represent the replacement of one or two oxygen atoms with sulfur in the phosphodiester (Table 7 and FIG. 19A). In some embodiments, the siRNA sequences may include other manmade nucleotides wherein further structural modifications have been made to the ribose moiety, such as the addition of bridging atoms that covalently link carbons 2′ and 5′ of the ribose moiety (FIG. 19B-C) or positions 1′ and 2′ of the ribose moiety (FIG. 19D), or alternatively, changes to the size of the sugar ring in a given nucleotide, for example, deletion of the bond between carbons 2′ and 3′ of the ribose moiety (FIG. 19E), or increasing the size of the sugar ring from five to six atoms (FIG. 19F-G).

TABLE 5
CD320

| OS ID | Antisense Strand (5′ TO 3′) | OSID | Sense Strand (5[′ TO 3′) |
|---|---|---|---|
| OSC1A | UCUUAUCCCUGCGCACGCGCA[dT][dT] (SEQ | OSC1S | UGCGCGUGCGCAGGGAUAAGA[dT][dT] |
| | ID NO 1) | | (SEQ ID NO: 94) |
| OSC2A | UCUCUUAUCCCUGCGCACGCG[dT][dT] (SEQ | OSC2S | CGCGUGCGCAGGGAUAAGAGA[dT][dT] |
| | ID NO 2) | | (SEQ ID NO: 95) |
| OSC3A | AUGCUGUCCCCACAGCGGCGC[dT][dT] (SEQ | OSC3S | GCGCCGCUGUGGGGACAGCAU[dT][dT] |
| | ID NO 3) | | (SEQ ID NO: 96) |
| OSC4A | AUCCAACCGCCGCUCAUGCUG[dT][dT] (SEQ | OSC4S | CAGCAUGAGCGGCGGUUGGAU[dT][dT] |
| | ID NO 4) | | (SEQ ID NO: 97) |
| OSC5A | UGGAAAGCGGGCUCGCGGCGG[dT][dT] (SEQ | OSC5S | CCGCCGCGAGCCCGCUUUCCA[dT][dT] |
| | ID NO 5) | | (SEQ ID NO: 98) |
| OSC6A | AACUUGGUGGGUGGGCACGAG[dT][dT] (SEQ | OSC6S | CUCGUGCCCACCCACCAAGUU[dT][dT] |
| | ID NO 6) | | (SEQ ID NO: 99) |
| OSC7A | UGGAACUUGGUGGGUGGGCAC[dT][dT] (SEQ | OSC7S | GUGCCCACCCACCAAGUUCCA[dT][dT] |
| | ID NO 7) | | (SEQ ID NO: 100) |
| OSC8A | ACUGGAACUUGGUGGGUGGGC[dT][dT] (SEQ | OSC8S | GCCCACCCACCAAGUUCCAGU[dT][dT] |
| | ID NO 8) | | (SEQ ID NO: 101) |
| OSC9A | UAAGCCACUGGUGCGGCACUG[dT][dT] (SEQ | OSC9S | CAGUGCCGCACCAGUGGCUUA[dT][dT] |
| | ID NO 9) | | (SEQ ID NO: 102) |
| OSC10A | ACGCAUAAGCCACUGGUGCGG[dT][dT] (SEQ | OSC10S | CCGCACCAGUGGCUUAUGCGU[dT][dT] |
| | ID NO 10) | | (SEQ ID NO: 103) |
| OSC11A | UCCAAGUCCCUGUCGCAGCGC[dT][dT] (SEQ | OSC11S | GCGCUGCGACAGGGACUUGGA[dT][dT] |
| | ID NO 11) | | (SEQ ID NO: 104) |
| OSC12A | UCCUCAUCGCUGCCAUCGCUG[dT][dT] (SEQ | OSC12S | CAGCGAUGGCAGCGAUGAGGA[dT][dT] |
| | ID NO 12) | | (SEQ ID NO: 105) |
| OSC13A | UCACUGACGCCGGUGCAGGGG[dT][dT] (SEQ | OSC13S | CCCCUGCACCGGCGUCAGUGA[dT][dT] |
| | ID NO 13) | | (SEQ ID NO: 106) |
| OSC14A | UUGUCAGUUCCCCCAGAGCAG[dT][dT] (SEQ | OSC14S | CUGCUCUGGGGGAACUGACAA[dT][dT] |
| | ID NO 14) | | (SEQ ID NO: 107) |
| OSC15A | UUCUUGUCAGUUCCCCCAGAG[dT][dT] (SEQ | OSC15S | CUCUGGGGGAACUGACAAGAA[dT][dT] |
| | ID NO 15) | | (SEQ ID NO: 108) |
| OSC16A | AGUUUCUUGUCAGUUCCCCCA[dT][dT] (SEQ | OSC16S | UGGGGGAACUGACAAGAAACU[dT][dT] |
| | ID NO 16) | | (SEQ ID NO: 109) |
| OSC17A- | CAGUUGCGCAGUUUCUUGUCAGUUC[dT][dT] | OSC17S- | GAACUGACAAGAAACUGCGCAACUG |
| 1 | (SEQ ID NO 17) | 1 | [dT][dT] (SEQ ID NO: 110) |
| OSC17A- | CAGUUGCGCAGUUUCUUGUCAGUUC[dT]*[dT] | OSC17S- | GAACUGACAAGAAACUGCGCAACUG[dT]* |
| 2 | (SEQ ID NO 18) | 2 | [dT] (SEQ ID NO: 111) |
| OSC17A- | [mC][mA][mG][mU][mU][mG][mC][mG][mC] | OSC17S- | [mG][mA][mA][mC][mU][mG][mA][mC] |
| 3 | [mA][mG][mU][mU][mU][mC][mU][mU][mG] | 3 | [mA][mA][mG][mA][mA][mA][mC][mU] |
| | [mU][mC][mA][mG][mU][mU][mC][dT]*[dT] | | [mG][mC][mG][mC][mA][mA][mC][mU][mG] |
| | (SEQ ID NO 19) | | [dT]*[dT] (SEQ ID NO: 112) |
| OSC17A- | [mC][mA][mG][mU][mU][mG][mC][mG][mC] | OSC17S- | [mG][mA][mA][mC][mU][mG][mA][mC] |
| 4 | [mA][mG][mU][mU][mU][mC][mU][mU][mG] | 4 | [mA][mA][mG][mA][mA][mA][mC][mU] |
| | [mU][mC][mA][mG][mU][mU][mC][dT]*[dT] | | [mG][mC][mG][mC][mA][mA][mC][mU][mG] |
| | (SEQ ID NO 20) | | (SEQ ID NO: 113) |
| OSC17A- | [mC][mA][mG][mU][mU][mG][mC][mG][mC] | OSC17S- | [mG][mA][mA][mC][mU][mG][mA][mC] |
| 5 | [mA][mG][mU][mU][mU][mC][mU][mU][mG] | 5 | [mA][mA][mG][mA][mA][mA][mC][mU] |
| | [mU][mC][mA][mG][mU][mU][mC] (SEQ ID | | [mG][mC][mG][mC][mA][mA][mC][mU][mG] |
| | NO 21) | | [dT]*[dT] (SEQ ID NO: 114) |
| OSC17A- | [mC][mA][mG][mU][mU][mG][mC][mG][mC] | OSC17S- | [mG][mA][mA][mC][mU][mG][mA][mC] |
| 6 | [mA][mG][mU][mU][mU][mC][mU][mU][mG] | 6 | [mA][mA][mG][mA][mA][mA][mC][mU] |
| | [mU][mC][mA][mG][mU][mU][mC] (SEQ ID | | [mG][mC][mG][mC][mA][mA][mC][mU][mG] |
| | NO 22) | | (SEQ ID NO: 115) |
| OSC17A- | [mC][mA][mG][mU][mU][mG][mC][mG][mC] | OSC17S- | GAACUGACAAGAAACUGCGCAACUG[dT]* |
| 7 | [mA][mG][mU][mU][mU][mC][mU][mU][mG] | 7 | [dT] (SEQ ID NO: 116) |
| | [mU][mC][mA][mG][mU][mU][mC] | | |
| | [dT]*[dT] (SEQ ID NO 23) | | |
| OSC17A- | [mC][2fA][mG][2fU][mU][2fG][mC] | OSC17S- | [2fG][mA][2fA][mC][2fU][mG][2fA][mC] |
| 8 | [2fG][mC][2fA][mG][2fU][mU][2fU][mC] | 8 | [2fA][mA][2fG][mA][2fA][mA][2fC][mU] |
| | [2fU][mU][2fG][mU][2fC][mA][2fG][mU] | | [2fG][mC][2fG][mC][2fA][mA][2fC][mU] |
| | [2fU][mC][dT]*[dT] (SEQ ID NO 24) | | [2fG][dT]*[[dT] (SEQ ID NO: 117) |
| OSC17A- | [mC][2fA][mG][2fU][mU][2fG][mC][2fG] | OSC17S- | [2fG][mA][2fA][mC][2fU][mG][2fA][mC] |
| 9 | [mC][2fA][mG][2fU][mU][2fU][mC] | 9 | [2fA][mA][2fG][mA][2fA][mA][2fC][mU] |
| | [2fU][mU][2fG][mU][2fC][mA][2fG][mU] | | [2fG][mC][2fG][mC][2fA][mA][2fC][mU] |
| | [2fU][mC] (SEQ ID NO 25) | | [2fG][dT]*[dT] (SEQ ID NO: 118) |
| OSC17A- | [mC][2fA][mG][2fU][mU][2fG][mC][2fG] | OSC17S- | [2fG][mA][2fA][mC][2fU][mG][2fA][mC] |
| 10 | [mC][2fA][mG][2fU][mU][2fU][mC][2fU] | 10 | [2fA][mA][2fG][mA][2fA][mA][2fC][mU] |
| | [mU][2fG][mU][2fC][mA][2fG][mU][2fU] | | [2fG][mC][2fG][mC][2fA][mA][2fC][mU] |
| | [mC][dT]*[dT] (SEQ ID NO 26) | | [2fG] (SEQ ID NO: 119) |
| OSC17A- | [mC][2fA][mG][2fU][mU][2fG][mC][2fG] | OSC17S- | [2fG][mA][2fA][mC][2fU][mG][2fA][mC] |
| 11 | [mC][2fA][mG][2fU][mU][2fU][mC] | 11 | [2fA][mA][2fG][mA][2fA][mA][2fC][mU] |
| | [2fU][mU][2fG][mU][2fC][mA][2fG][mU] | | [2fG][mC][2fG][mC][2fA][mA][2fC][mU] |
| | [2fU][mC] (SEQ ID NO 27) | | [2fG] (SEQ ID NO: 120) |
| OSC17A- | [2fC][mA][2fG][mU][2fU][mG][2fC][mG] | OSC17S- | [mG][2fA][mA][2fC][mU][2fG][mA][2fC] |
| 12 | [2fC][mA][2fG][mU][2fU][mU][2fC][mU] | 12 | [mA][2fA][mG][2fA][mA][2fA][mC][2fU] |
| | [2fU][mG][2fU][mC][2fA][mG][2fU][mU] | | [mG][2fC][mG][2fC][mA][2fA][mC][2fU] |
| | [2fC][dT]*[dT](SEQ ID NO 28) | | [mG][dT]*[dT] (SEQ ID NO: 121) |
| OSC17A- | [2fC][mA][2fG][mU][2fU][mG][2fC][mG] | OSC17S- | [mG][2fA][mA][2fC][mU][2fG][mA][2fC] |
| 13 | [2fC][mA][2fG][mU][2fU][mU][2fC][mU] | 13 | [mA][2fA][mG][2fA][mA][2fA][mC] |
| | [2fU][mG][2fU][mC][2fA][mG][2fU] | | [2fU][mG][2fC][mG][2fC][mA][2fA][mC] |
| | [mU][2fC](SEQ ID NO 29) | | [2fU][mG] (SEQ ID NO: 122) |
| OSC17A- | [mC][2fA][2fG][2fU][2fU][2fG][2fC][2fG] | OSC17S- | [2fU][mG][2fA][mC][2fA][mA][2fG][mA] |
| 14 | [2fC][2fA][2fG][2fU][2fU][2fU][2fC] | 14 | [2fA][mA][2fC][mU][2fG][mC][2fG][mC] |
| | [2fU][2fU][2fG][2fU][2fC][2fA][2fG] | | [2fA][mA][2fC][mU][2fG][dT]*[dT] |
| | [2fU][2fU][2fC][dT]*[dT] (SEQ ID NO 30) | | (SEQ ID NO: 123) |
| OSC17A- | [mC][2fA][2fG][2fU][2fU][2fG][2fC] | OSC17S- | [2fG][mA][2fA][mA][2fC][mU][2fG][mC] |
| 15 | [2fG][2fC][2fA][2fG][2fU][2fU][2fU] | 15 | [2fG][mC][2fA][mA][2fC][mU][2fG] |
| | [2fC][2fU][2fU][2fG][2fU][2fC][2fA] | | [dT]*[dT] (SEQ ID NO: 124) |
| | [2fG][2fU][2fU][2fC][dT]*[dT] | | |
| | (SEQ ID NO 31) | | |
| OSC17A- | [mC][2fA][mG][2fU][mU][2fG][mC][2fG] | OSC17S- | [2fG][mA][2fA][mA][2fC][mU][2fG][mC] |
| 16 | [mC][2fA][mG][2fU][mU][2fU][mC][2fU] | 16 | [2fG][mC][2fA][mA][2fC][mU][2fG] |
| | [mU][2fG][mU][2fC][mA][2fG][mU][2fU] | | [dT]*[dT] (SEQ ID NO: 125) |
| | [mC][dT]*[dT] (SEQ ID NO 32) | | |
| OSC17A- | [mC][2fA][mG][2fU][mU][2fG][mC] | OSC17S- | [2fG][mA][2fA][mA][2fC][mU][2fG][mC] |
| 17 | [2fG][mC][2fA][mG][2fU][mU][2fU][mC] | 17 | [2fG][mC][2fA][mA][2fC][mU][2fG] |
| | [2fU][mU][2fG][mU][2fC][mA][2fG] | | (SEQ ID NO: 126) |
| | [mU] (SEQ ID NO 33) | | |
| OSC17A- | [mC][2fA][mG][2fU][mU][2fG][mC][2fG] | OSC17S- | [2fG][mA][2fA][mA][2fC][mU][2fG][mC] |
| 18 | [mC][2fA][mG][2fU][mU][2fU][mC] | 18 | [2fG][mC][2fA][mA][2fC][mU][2fG] |
| | [2fU][2fU][2fG][2fU][2fC][2fA][2fG] | | (SEQ ID NO: 127) |
| | [2fU] (SEQ ID NO 34) | | |
| OSC18A | AUGCAGUCAUCGCUCAGCGUG[dT][dT] (SEQ | OSC18S | CACGCUGAGCGAUGACUGCAU[dT][dT] |
| | ID NO 35) | | (SEQ ID NO: 128) |
| OSC19A | AAUGCAGUCAUCGCUCAGCGU[dT][dT] (SEQ | OSC19S | ACGCUGAGCGAUGACUGCAUU[dT][dT] |
| | ID NO 36) | | (SEQ ID NO: 129) |
| OSC20A | UGGAAUGCAGUCAUCGCUCAG[dT][dT] (SEQ | OSC20S | CUGAGCGAUGACUGCAUUCCA[dT][dT] |
| | ID NO 37) | | (SEQ ID NO: 130) |
| OSC21A | AGUGGAAUGCAGUCAUCGCUC[dT][dT] (SEQ | OSC21S | GAGCGAUGACUGCAUUCCACU[dT][dT] |
| | ID NO 38) | | (SEQ ID NO: 131) |
| OSC22A | ACAGUCUGGGUGGCCGUCGCA[dT][dT] (SEQ | OSC22S | UGCGACGGCCACCCAGACUGU[dT][dT] |
| | ID NO 39) | | (SEQ ID NO: 132) |
| OSC23A | AUUGGUUCCACAGCCGAGCUC[dT][dT] (SEQ | OSC23S | GAGCUCGGCUGUGGAACCAAU[dT][dT] |
| | ID NO 40) | | (SEQ ID NO: 133) |
| OSC24A | UCUCAUUGGUUCCACAGCCGA[dT][dT] (SEQ | OSC24S | UCGGCUGUGGAACCAAUGAGA[dT][dT] |
| | ID NO 41) | | (SEQ ID NO: 134) |
| OSC25A | AUCUCAUUGGUUCCACAGCCG[dT][dT] (SEQ | OSC25S | CGGCUGUGGAACCAAUGAGAU[dT][dT] |
| | ID NO 42) | | (SEQ ID NO: 135) |
| OSC26A | AGGAUCUCAUUGGUUCCACAG[dT][dT] (SEQ | OSC26S | CUGUGGAACCAAUGAGAUCCU[dT][dT] |
| | ID NO 43) | | (SEQ ID NO: 136) |
| OSC27A | UGAGAGAGGUGACACUCUCCA[dT][dT] (SEQ | OSC27S | UGGAGAGUGUCACCUCUCUCA[dT][dT] |
| | ID NO 44) | | (SEQ ID NO: 137) |
| OSC28A | UGGUUGUGGCAUUCCUGAGAG[dT][dT] | OSC28S | CUCUCAGGAAUGCCACAACCA[dT][dT] |
| | (SEQ ID NO 45) | | (SEQ ID NO: 138) |
| OSC29A | UGGCAUUCCCGACAGAGGGGA[dT][dT] (SEQ | OSC29S | UCCCCUCUGUCGGGAAUGCCA[dT][dT] |
| | ID NO 46) | | (SEQ ID NO: 139) |
| OSC30A | AGGAUGUGGCAUUCCCGACAG[dT][dT] (SEQ | OSC30S | CUGUCGGGAAUGCCACAUCCU[dT][dT] |
| | ID NO 47) | | (SEQ ID NO: 140) |
| OSC31A | UUCCAGACUGGUCUCCGGCAG[dT][dT] (SEQ | OSC31S | CUGCCGGAGACCAGUCUGGAA[dT][dT] |
| | ID NO 48) | | (SEQ ID NO: 141) |
| OSC32A | AUAACCCCAUAGGCAGUUGGG[dT][dT] (SEQ | OSC32S | CCCAACUGCCUAUGGGGUUAU[dT][dT] |
| | ID NO 49) | | (SEQ ID NO: 142) |
| OSC33A | UUGCACUGAGCACCGCAGCAG[dT][dT] (SEQ | OSC33S | CUGCUGCGGUGCUCAGUGCAA[dT][dT] |
| | ID NO 50) | | (SEQ ID NO: 143) |
| OSC34A | AAAAGGAGGAGGGUGGCGGUG[dT][dT] (SEQ | OSC34S | CACCGCCACCCUCCUCCUUUU[dT][dT] |
| | ID NO 51) | | (SEQ ID NO: 144) |
| OSC35A | ACAAAAGGAGGAGGGUGGCGG[dT][dT] (SEQ | OSC35S | CCGCCACCCUCCUCCUUUUGU[dT][dT] |
| | ID NO 52) | | (SEQ ID NO: 145) |
| OSC36A | ACCAGUAACCCCAGUGGGCGG[dT][dT] (SEQ | OSC36S | CCGCCCACUGGGGUUACUGGU[dT][dT] |
| | ID NO 53) | | (SEQ ID NO: 146) |
| OSC37A | UUCAUGGCCACCAGUAACCCC[dT][dT] (SEQ | OSC37S | GGGGUUACUGGUGGCCAUGAA[dT][dT] |
| | ID NO 54) | | (SEQ ID NO: 147) |
| OSC38A | ACUCCUUCAUGGCCACCAGUA[dT][dT] (SEQ | OSC38S | UACUGGUGGCCAUGAAGGAGU[dT][dT] |
| | ID NO 55) | | (SEQ ID NO: 148) |
| OSC39A | UUCUGACAGCAGCAGGGACUC[dT][dT] (SEQ | OSC39S | GAGUCCCUGCUGCUGUCAGAA[dT][dT] |
| | ID NO 56) | | (SEQ ID NO: 149) |
| OSC40A | UCUGUUCUGACAGCAGCAGGG[dT][dT] (SEQ | OSC40S | GGCUGCUGCUGUCAGAACAGA[dT][dT] |
| | ID NO 57) | | (SEQ ID NO: 150) |
| OSC41A | UCUUCUGUUCUGACAGCAGCA[dT][dT] (SEQ | OSC41S | UGCUGCUGUCAGAACAGAAGA[dT][dT] |
| | ID NO 58) | | (SEQ ID NO: 151) |
| OSC42A | AGGUCUUCUGUUCUGACAGCA[dT][dT] (SEQ | OSC42S | UGCUGUCAGAACAGAAGACCU[dT][dT] |
| | ID NO 59) | | (SEQ ID NO: 152) |
| OSC43A | UUGUCCUCAGGGCAGCGAGGU[dT][dT] (SEQ | OSC43S | ACCUCGCUGCCCUGAGGACAA[dT][dT] |
| | ID NO 60) | | (SEQ ID NO: 153) |
| OSC44A | AAGUGCUUGUCCUCAGGGCAG[dT][dT] (SEQ | OSC44S | CUGCCCUGAGGACAAGCACUU[dT][dT] |
| | ID NO 61) | | (SEQ ID NO: 154) |
| OSC45A | UACCCAUCCGCAUCACUGCUC[dT][dT] (SEQ | OSC45S | GAGCAGUGAUGCGGAUGGGUA[dT][dT] |
| | ID NO 62) | | (SEQ ID NO: 155) |
| OSC46A | UCUCUGAGGGCUGGUGUGCCC[dT][dT] (SEQ | OSC46S | GGGCACACCAGCCCUCAGAGA[dT][dT] |
| | ID NO 63) | | (SEQ ID NO: 156) |
| OSC47A- | AAGAGCUCAGGUCUCUGAGGG[dT][dT] (SEQ | OSC47S- | CCCUCAGAGACCUGAGCUCUU[dT][dT] |
| 1 | ID NO 64) | 1 | (SEQ ID NO: 157) |
| OSC47A- | AAGAGCUCAGGUCUCUGAGGG[dT]*[dT] | OSC47S- | CCCUCAGAGACCUGAGCUCUU[dT]*[dT] |
| 2 | (SEQ ID NO 65) | 2 | (SEQ ID NO: 158) |
| OSC47A- | [mA][mA][mG][mA][mG][mC][mU][mC][mA] | OSC47S- | [mC][mC][mC][mU][mC][mA][mG][mA] |
| 3 | [mG][mG][mU][mC][mU][mC][mU][mG][mA] | 3 | [mG][mA][mC][mC][mU][mG][mA][mG] |
| | [mG][mG][mG][dT]*[dT] (SEQ ID NO 66) | | [mC][mU][mC][mU][mU][dT]*[dT] |
| | | | (SEQ ID NO: 159) |
| OSC47A- | [mA][mA][mG][mA][mG][mC][mU][mC][mA] | OSC47S- | [mC][mC][mC][mU][mC][mA][mG][mA] |
| 4 | [mG][mG][mU][mC][mU][mC][mU][mG][mA] | 4 | [mG][mA][mC][mC][mU][mG][mA][mG] |
| | [mG][mG][mG][dT]*[dT] (SEQ ID NO 67) | | [mC][mU][mC][mU][mU] |
| | | | (SEQ ID NO: 160) |
| OSC47A- | [mA][mA][mG][mA][mG][mC][mU][mC][mA] | OSC47S- | [mC][mC][mC][mU][mC][mA][mG][mA] |
| 5 | [mG][mG][mU][mC][mU][mC][mU][mG][mA] | 5 | [mG][mA][mC][mC][mU][mG][mA][mG] |
| | [mG][mG][mG] (SEQ ID NO 68) | | [mC][mU][mC][mU][mU][dT]*[dT] |
| | | | (SEQ ID NO: 161) |
| OSC47A- | [mA][mA][mG][mA][mG][mC][mU][mC][mA] | OSC47S- | [mC][mC][mC][mU][mC][mA][mG][mA] |
| 6 | [mG][mG][mU][mC][mU][mC][mU][mG][mA] | 6 | [mG][mA][mC][mC][mU][mG][mA][mG] |
| | [mG][mG][mG] (SEQ ID NO 69) | | [mC][mU][mC][mU][mU] |
| | | | (SEQ ID NO: 162) |
| OSC47A- | [mA][mA][mG][mA][mG][mC][mU][mC][mA] | OSC47S- | CCCUCAGAGACCUGAGCUCUU[dT]*[dT] |
| 7 | [mG][mG][mU][mC][mU][mC][mU][mG][mA] | 7 | (SEQ ID NO: 163) |
| | [mG][mG][mG][dT]*[dT] (SEQ ID NO 70) | | |
| OSC47A- | [mA][2fA][mG][2fA][mG][2fC][mU][2fC] | OSC47S- | [2fC][mC][2fC][mU][2fC][mA][2fG][mA] |
| 8 | [mA][2fG][mG][2fU][mC][2fU][mC] | 8 | [2fG][mA][2fC][mC][2fU][mG][2fA][mG] |
| | [2fU][mG][2fA][mG][2fG][mG][dT]* | | [2fC][mU][2fC][mU][2fU][dT]*[dT] |
| | [dT] (SEQ ID NO 71) | | (SEQ ID NO: 164) |
| OSC47A- | [mA][2fA][mG][2fA][mG][2fC][mU][2fC] | OSC47S- | [2fC][mC][2fC][mU][2fC][mA][2fG][mA] |
| 9 | [mA][2fG][mG][2fU][mC][2fU] | 9 | [2fG][mA][2fC][mC][2fU][mG][2fA][mG] |
| | [mC][2fU][mG][2fA][mG][2fG] | | [2fC][mU][2fC][mU][2fU][dT]*[dT] |
| | [mG] (SEQ ID NO 72) | | (SEQ ID NO: 165) |
| OSC47A- | [mA][2fA][mG][2fA][mG][2fC][mU][2fC] | OSC47S- | [2fC][mC][2fC][mU][2fC][mA][2fG][mA] |
| 10 | [mA][2fG][mG][2fU][mC][2fU][mC][2fU] | 10 | [2fG][mA][2fC][mC][2fU][mG][2fA][mG] |
| | [mG][2fA][mG][2fG][mG][dT]*[dT] | | [2fC][mU][2fC][mU][2fU] |
| | (SEQ ID NO 73) | | (SEQ ID NO: 166) |
| OSC47A- | [mA][2fA][mG][2fA][mG][2fC][mU][2fC] | OSC47S- | [2fC][mC][2fC][mU][2fC][mA][2fG] |
| 11 | [mA][2fG][mG][2fU][mC][2fU][mC][2fU] | 11 | [mA][2fG[mA][2fC][mC][2fU][mG][2fA] |
| | [mG][2fA][mG][2fG][mG] | | [mG][2fC][mU][2fC][mU][2fU] |
| | (SEQ ID NO 74) | | (SEQ ID NO: 167) |
| OSC47A- | [2fA][mA][2fG][mA][2fG][mC][2fU][mC] | OSC47S- | [mC][2fC][mC][2fU][mC][2fA][mG][2fA] |
| 12 | [2fA][mG][2fG][mU][2fC][mU][2fC] | 12 | [mG][2fA][mC][2fC][mU][2fG][mA][2fG] |
| | [mU][2fG][mA][2fG][mG][2fG][dT]*[dT] | | [mC][2fU][mC][2fU][mU][dT][dT]* |
| | (SEQ ID NO 75) | | (SEQ ID NO: 168) |
| OSC47A- | [2fA][mA][2fG][mA][2fG][mC][2fU][mC] | OSC47S- | [2fC][mC][2fC][mU][2fC][mA][2fG][mA] |
| 13 | [2fA][mG][2fG][mU][2fC][mU][2fC] | 13 | [2fG][mA][2fC][mC][2fU][mG][2fA][mG] |
| | [mU][2fG][mA][2fG][mG][2fG] | | [2fC][mU][2fC][mU][2fU]-LIG-LINKER |
| | (SEQ ID NO 76) | | (SEQ ID NO: 169) |
| OSC47A- | [mA][2fA][2fG][mA][2fG][mC][2fU][mC] | OSC47S- | [2fC][mC][2fC][mU][2fC][mA][2fG][mA] |
| 14 | [2fA][mG][2fG][mU][2fC][mU][2fC][mU] | 14 | [2fG][mA][2fC][mC][2fU][mG][2fA] |
| | [2fG][mA][2fG][mG][2fG] | | [mG][2fC][mU][2fC][mU][2fU][dT]*[dT] |
| | (SEQ ID NO 77) | | (SEQ ID NO: 170) |
| OSC47A- | [mA][2fA][2fG][mA][2fG][mC][2fU][mC] | OSC47S- | [2fG][mA][2fG][mA][2fC][mC][2fU][mG] |
| | [2fA][mG][2fG][mU][2fC][mU][2fC][mU] | 15 | [2fA][mG][2fC][mU][2fC][mU][2fU] |
| 15 | [2fG][mA][2fG][mG][2fG][dT]*[dT] | | [dT]*[dT] (SEQ ID NO: 171) |
| | (SEQ ID NO 78) | | |
| OSC47A- | [2fA][mA][2fG][mA][2fG][mC][2fU][mC] | OSC47S- | [2fG][mA][2fG][mA][2fC][mC][2fU][mG] |
| 16 | [2fA][mG][2fG][mU][2fC][mU][2fC][mU] | 16 | [2fA][mG][2fC][mU][2fC][mU][2fU] |
| | [2fG][mA][2fG][mG][2fG][dT]*[dT] | | [dT]*[dT] (SEQ ID NO: 172) |
| | (SEQ ID NO 79) | | |
| OSC47A- | [2fA][mA][2fG][mA][2fG][mC][2fU][mC] | OSC47S- | [2fG][mA][2fG][mA][2fC][mC][2fU][mG] |
| 17 | [2fA][mG][2fG][mU][2fC][mU][2fC][mU] | 17 | [2fA][mG][2fC][mU][2fC][mU][2fU] |
| | [2fG][mA][2fG][mG][2fG][dT]*[dT] | | (SEQ ID NO: 173) |
| | (SEQ ID NO 80) | | |
| OSC47A- | [2fA][mA][2fG][mA][2fG][mC][2fU] | OSC47S- | [2fG][mA][2fG][mA][2fC][mC][2fU][mG] |
| 18 | [mC][2fA][mG][2fG][mU][2fC][mU] | 18 | [2fA][mG][2fC][mU][2fC][mU][2fU] |
| | [2fC][2fU][2fG][2fA][2fG][2fG][2fG] | | (SEQ ID NO: 174) |
| | (SEQ ID NO 81) | | |
| OSC48A | AAGAGCUCAGGUCUCUGAGGG[dT][dT] (SEQ | OSC48S | CCCUCAGAGACCUGAGCUCUU[dT][dT] |
| | ID NO 82) | | (SEQ ID NO: 175) |
| OSC49A | AGAAGAGCUCAGGUCUCUGAG[dT][dT] (SEQ | OSC49S | CUCAGAGACCUGAGCUCUUCU[dT][dT] |
| | ID NO: 83) | | (SEQ ID NO: 176) |
| OSC50A | AUAGGGAGUGUCCAGGGACCC[dT][dT] (SEQ | OSC50S | GGGUCCCUGGACACUCCCUAU[dT][dT] |
| | ID NO: 84) | | (SEQ ID NO: 177) |
| OSC51A | UCCAUAGGGAGUGUCCAGGGA[dT][dT] (SEQ | OSC51S | UCCCUGGACACUCCCUAUGGA[dT][dT] |
| | ID NO: 85) | | (SEQ ID NO: 178) |
| OSC52A | AUCUCCAUAGGGAGUGUCCAG[dT][dT] (SEQ | OSC52S | CUGGACACUCCCUAUGGAGAU[dT][dT] |
| | ID NO: 86) | | (SEQ ID NO: 179) |
| OSC53A | UCAGUUCUGGCUGUGGCAGGU[dT][dT] (SEQ | OSC53S | ACCUGCCACAGCCAGAACUGA[dT][dT] |
| | ID NO: 87) | | (SEQ ID NO: 180) |
| OSC54A | UUCUACCCCCUGGGAGCUGCC[dT][dT] (SEQ | OSC54S | GGCAGCUCCCAGGGGGUAGAA[dT][dT] |
| | ID NO: 88) | | (SEQ ID NO: 181) |
| OSC55A | AAGCACAGGGCCGUUCUACCC[dT][dT] (SEQ | OSC55S | GGGUAGAACGGCCCUGUGCUU[dT][dT] |
| | ID NO: 89) | | (SEQ ID NO: 182) |
| OSC56A | UGUCUUAAGCACAGGGCCGUU[dT][dT] (SEQ | OSC56S | AACGGCCCUGUGCUUAAGACA[dT][dT] |
| | ID NO: 90) | | (SEQ ID NO: 183) |
| OSC57A | AGUGUCUUAAGCACAGGGCCG[dT][dT] (SEQ | OSC57S | CGGCCCUGUGCUUAAGACACU[dT][dT] |
| | ID NO: 91) | | (SEQ ID NO: 184) |
| OSC58A | UUUUUUGAGGAUGUGAAGCAA[dT][dT] | OSC58S | UUGCUUCACAUCCUCAAAAAA[dT][dT] |
| | (SEQ ID NO: 92) | | (SEQ ID NO: 185) |
| OSC59A | UUUUUUUGAGGAUGUGAAGCA[dT][dT] | OSC59S | UGCUUCACAUCCUCAAAAAAA[dT][dT] |
| | (SEQ ID NO: 93) | | (SEQ ID NO: 186) |

TABLE 6
LRP2

| OS ID | Antisense Strand (5′ TO 3′) | OS ID | Sense Strand (5′ TO 3′) |
|---|---|---|---|
| OSL1A | UACUUUGUGAGCAAUCUUGAC[dT][dT] (SEQ | OSL1S | GUCAAGAUUGCUCACAAAGUA[dT][dT] |
| | ID NO: 187) | | (SEQ ID NO: 561) |
| OSL2A | AUUCACUUGGGAUACACUGAC[dT][dT] (SEQ | OSL2S | GUCAGUGUAUCCCAAGUGAAU[dT][dT] |
| | ID NO: 188) | | (SEQ ID NO: 562) |
| OSL3A | ACAUGAAAACUCAUUGUGCAA[dT][dT] (SEQ | OSL3S | UUGCACAAUGAGUUUUCAUGU[dT][dT] |
| | ID NO: 189) | | (SEQ ID NO: 563) |
| OSL4A | UCUUUACAGUCAUCUUCUCCA[dT][dT] (SEQ | OSL4S | UGGAGAAGAUGACUGUAAAGAUA[dT][dT |
| | ID NO: 190) | | (SEQ ID NO: 564) |
| OSL5A | UAUCUUUACAGUCAUCUUCUC[dT][dT] (SEQ | OSL5S | GAGAAGAUGACUGUAAAGAUA[dT][dT] |
| | ID NO: 191) | | (SEQ ID NO: 565) |
| OSL6A | AACAUUUAUGAACAUCAUGAG[dT][dT] (SEQ | OSL6S | CUCAUGAUGUUCAUAAAUGUU[dT][dT] |
| | ID NO: 192) | | (SEQ ID NO: 566) |
| OSL7A | UCACAAACUUUAUAAAUGGAG[dT][dT] (SEQ | OSL7S | CUCCAUUUAUAAAGUUUGUGA[dT][dT] |
| | ID NO: 193) | | (SEQ ID NO: 567) |
| OSL8A | AUCACAAACUUUAUAAAUGGA[dT][dT] (SEQ | OSL8S | UCCAUUUAUAAAGUUUGUGAU[dT][dT] |
| | ID NO: 194) | | (SEQ ID NO: 568) |
| OSL9A | AUACUACAGUAUUUUCCGGUA[dT][dT] (SEQ | OSL9S | UACCGGAAAAUACUGUAGUAU[dT][dT] |
| | ID NO: 195) | | (SEQ ID NO: 569) |
| OSL10 | UCAUACUACAGUAUUUUCCGG[dT][dT] (SEQ | OSL10S | CCGGAAAAUACUGUAGUAUGA[dT][dT] |
| A | ID NO: 196) | | (SEQ ID NO: 570) |
| OSL11 | ACAAAUUCCCCAUAUCUGGCA[dT][dT] (SEQ | OSL11S | UGCCAGAUAUGGGGAAUUUGU[dT][dT] |
| A | ID NO: 197) | | (SEQ ID NO: 571) |
| OSL12 | AAGAUAUACCCUUCUUCACAG[dT][dT] (SEQ | OSL12S | CUGUGAAGAAGGGUAUAUCUU[dT][dT] |
| A | ID NO: 198) | | (SEQ ID NO: 572) |
| OSL13 | UUAGCUUUGCAAUACUGUCCA[dT][dT] (SEQ | OSL13S | UGGACAGUAUUGCAAAGCUAA[dT][dT] |
| A | ID NO: 199) | | (SEQ ID NO: 573) |
| OSL14 | AUCAUUAGCUUUGCAAUACUG[dT][dT] (SEQ | OSL14S | CAGUAUUGCAAAGCUAAUGAU[dT][dT] |
| A | ID NO: 200) | | (SEQ ID NO: 574) |
| OSL15 | AAAGGAAUCAUUAGCUUUGCA[dT][dT] (SEQ | OSL15S | UGCAAAGCUAAUGAUUCCUUU[dT][dT] |
| A | ID NO: 201) | | (SEQ ID NO: 575) |
| OSL16 | AUGAAUAUCACCAAUUAACAA[dT][dT] (SEQ | OSL16S | UUGUUAAUUGGUGAUAUUCAU[dT][dT] |
| A | ID NO: 202) | | (SEQ ID NO: 576) |
| OSL17 | AAAAAACCUUAUUUUGCACGG[dT][dT] (SEQ | OSL17S | CCGUGCAAAAUAAGGUUUUUU[dT][dT] |
| A | ID NO: 203) | | (SEQ ID NO: 577) |
| OSL18 | UGAAAAAACCUUAUUUUGCAC[dT][dT] (SEQ | OSL18S | GUGCAAAAUAAGGUUUUUUCA[dT][dT] |
| A | ID NO: 204) | | (SEQ ID NO: 578) |
| OSL19 | AAUGUCAACUGAAAAAACCUU[dT][dT] (SEQ | OSL19S | AAGGUUUUUUCAGUUGACAUU[dT][dT] |
| A | ID NO: 205) | | (SEQ ID NO: 579) |
| OSL20 | UAAUGUCAACUGAAAAAACCU[dT][dT] (SEQ | OSL20S | AGGUUUUUUCAGUUGACAUUA[dT][dT] |
| A | ID NO: 206) | | (SEQ ID NO: 580) |
| OSL21 | UUAAACCAUUAAUGUCAACUG[dT][dT] (SEQ | OSL21S | CAGUUGACAUUAAUGGUUUAA[dT][dT] |
| A | ID NO: 207) | | (SEQ ID NO: 581) |
| OSL22 | UAUUUAAACCAUUAAUGUCAA[dT][dT] (SEQ | OSL22S | UUGACAUUAAUGGUUUAAAUA[dT][dT] |
| A | ID NO: 208) | | (SEQ ID NO: 582) |
| OSL23 | UAGAUUUUAUUAUUAACCCAG[dT][dT] (SEQ | OSL23S | CUGGGUUAAUAAUAAAAUCUA[dT][dT] |
| A | ID NO: 209) | | (SEQ ID NO: 583) |
| OSL24 | AUAGAUUUUAUUAUUAACCCA[dT][dT] (SEQ | OSL24S | UGGGUUAAUAAUAAAAUCUAU[dT][dT] |
| A | ID NO: 210) | | (SEQ ID NO: 584) |
| OSL25 | AAAUUUACCAUAUCUAUGCGG[dT][dT] (SEQ | OSL25S | CCGCAUAGAUAUGGUAAAUUU[dT][dT] |
| A | ID NO: 211) | | (SEQ ID NO: 585) |
| OSL26 | AAGUUUUCAGUUAUAAGGGUA[dT][dT] (SEQ | OSL26S | UACCCUUAUAACUGAAAACUU[dT][dT] |
| A | ID NO: 212) | | (SEQ ID NO: 586) |
| OSL27 | AAUAAAUAACCAACAGUUGGG[dT][dT] (SEQ | OSL27S | CCCAACUGUUGGUUAUUUAUU[dT][dT] |
| A | ID NO: 213) | | (SEQ ID NO: 587) |
| OSL28 | AGAAAAAUAAAUAACCAACAG[dT][dT] (SEQ | OSL28S | CUGUUGGUUAUUUAUUUUUCU[dT][dT] |
| A | ID NO: 214) | | (SEQ ID NO: 588) |
| OSL29 | AUAUCAUAUCCAGAGUUACCC[dT][dT] (SEQ | OSL29S | GGGUAACUCUGGAUAUGAUAU[dT][dT] |
| A | ID NO: 215) | | (SEQ ID NO: 589) |
| OSL30 | AGUUUCAAUGUAAUCAAACCG[dT][dT] (SEQ | OSL30S | CGGUUUGAUUACAUUGAAACU[dT][dT] |
| A | ID NO: 216) | | (SEQ ID NO: 590) |
| OSL31 | UUACAGUUUCAAUGUAAUCAA[dT][dT] (SEQ | OSL31S | UUGAUUACAUUGAAACUGUAA[dT][dT] |
| A | ID NO: 217) | | (SEQ ID NO: 591) |
| OSL32 | AUAAGUUACAGUUUCAAUGUA[dT][dT] (SEQ | OSL32S | UACAUUGAAACUGUAACUUAU[dT][dT] |
| A | ID NO: 218) | | (SEQ ID NO: 592) |
| OSL33 | UCUUUACACGGAUUGGUAGCA[dT][dT] (SEQ | OSL33S | UGCUACCAAUCCGUGUAAAGA[dT][dT] |
| A | ID NO: 219) | | (SEQ ID NO: 593) |
| OSL34 | AAAAUCAAUCCCGACAAAGAA[dT][dT] (SEQ | OSL34S | UUCUUUGUCGGGAUUGAUUUU[dT][dT] |
| A | ID NO: 220) | | (SEQ ID NO: 594) |
| OSL35 | UCUGAAAAAAAGAUAGUGCUG[dT][dT] (SEQ | OSL35S | CAGCACUAUCUUUUUUUCAGA[dT][dT] |
| A | ID NO: 221) | | (SEQ ID NO: 595) |
| OSL36 | AUCUGAAAAAAAGAUAGUGCU[dT][dT] (SEQ | OSL36S | AGCACUAUCUUUUUUUCAGAU[dT][dT] |
| A | ID NO: 222) | | (SEQ ID NO: 596) |
| OSL37 | AAAAAUCAUGUGUUUUGACAU[dT][dT] (SEQ | OSL37S | AUGUCAAAACACAUGAUUUUU[dT][dT] |
| A | ID NO: 223) | | (SEQ ID NO: 597) |
| OSL38 | UUUGCUUAAAAAUCAUGUGUU[dT][dT] (SEQ | OSL38S | AACACAUGAUUUUUAAGCAAA[dT][dT] |
| A | ID NO: 224) | | (SEQ ID NO: 598) |
| OSL39 | AACUUUCAACAUUUUCCACCC[dT][dT] (SEQ | OSL39S | GGGUGGAAAAUGUUGAAAGUU[dT][dT] |
| A | ID NO: 225) | | (SEQ ID NO: 599) |
| OSL40 | UUGAAAUCCAAUCAAAAGCCA[dT][dT] (SEQ | OSL40S | UGGCUUUUGAUUGGAUUUCAA[dT][dT] |
| A | ID NO: 226) | | (SEQ ID NO: 600) |
| OSL41 | UUUGAAAUCCAAUCAAAAGCC[dT][dT] (SEQ | OSL41S | GGCUUUUGAUUGGAUUUCAAA[dT][dT] |
| A | ID NO: 227) | | (SEQ ID NO: 601) |
| OSL42 | UAGAGAUUCUUUGAAAUCCAA[dT][dT] (SEQ | OSL42S | UUGGAUUUCAAAGAAUCUCUA[dT][dT] |
| A | ID NO: 228) | | (SEQ ID NO: 602) |
| OSL43 | AUAGAGAUUCUUUGAAAUCCA[dT][dT] (SEQ | OSL43S | UGGAUUUCAAAGAAUCUCUAU[dT][dT] |
| A | ID NO: 229) | | (SEQ ID NO: 603) |
| OSL44 | UUUAAAUACUGAACUACUGUG[dT][dT] (SEQ | OSL44S | CACAGUAGUUCAGUAUUUAAA[dT][dT] |
| A | ID NO: 230) | | (SEQ ID NO: 604) |
| OSL45 | UAUUUAAAUACUGAACUACUG[dT][dT] (SEQ | OSL45S | CAGUAGUUCAGUAUUUAAAUA[dT][dT] |
| A | ID NO: 231) | | (SEQ ID NO: 605) |
| OSL46 | AUAGAUACCCGGCAAAAGGAU[dT][dT] (SEQ | OSL46S | AUCCUUUUGCCGGGUAUCUAU[dT][dT] |
| A | ID NO: 232) | | (SEQ ID NO: 606) |
| OSL47 | AAGAGUAGUGUUUAUUACAGG[dT][dT] (SEQ | OSL47S | CCCCUGUAAUAAACACUACUC[dT][dT] |
| A | ID NO: 233) | | (SEQ ID NO: 607) |
| OSL48 | AUCAAAAUAGGCAUCUACCCA[dT][dT] (SEQ | OSL48S | UGGGUAGAUGCCUAUUUUGAU[dT][dT] |
| A | ID NO: 234) | | (SEQ ID NO: 608) |
| OSL49 | UCAAUUUUAUCAAAAUAGGCA[dT][dT] (SEQ | OSL49S | UGCCUAUUUUGAUAAAAUUGA[dT][dT] |
| A | ID NO: 235) | | (SEQ ID NO: 609) |
| OSL50 | UAAAUGCUCUCCAAAGAUGGC[dT][dT] (SEQ | OSL50S | GCCAUCUUUGGAGAGCAUUUA[dT][dT] |
| A | ID NO: 236) | | (SEQ ID NO: 610) |
| OSL51 | UCAAAUGCAGUAUGUAAGCAA[dT][dT] (SEQ | OSL51S | UUGCUUACAUACUGCAUUUGA[dT][dT] |
| A | ID NO: 237) | | (SEQ ID NO: 611) |
| OSL52 | UUCAAAUGCAGUAUGUAAGCA[dT][dT] (SEQ | OSL52S | UGCUUACAUACUGCAUUUGAA[dT][dT] |
| A | ID NO: 238) | | (SEQ ID NO: 612) |
| OSL53 | UGAUUACAGGCGUUAGAACCA[dT][dT] (SEQ | OSL53S | UGGUUCUAACGCCUGUAAUCA[dT][dT] |
| A | ID NO: 239) | | (SEQ ID NO: 613) |
| OSL54 | UGUUAUCAUGACAAUCAUCGA[dT][dT] (SEQ | OSL54S | UCGAUGAUUGUCAUGAUAACA[dT][dT] |
| A | ID NO: 240) | | (SEQ ID NO: 614) |
| OSL55 | UUAUCACAGGUGUAUUGGGUG[dT][dT] (SEQ | OSL55S | CACCCAAUACACCUGUGAUAA[dT][dT] |
| A | ID NO: 241) | | (SEQ ID NO: 615) |
| OSL56 | AUUAUCACAGGUGUAUUGGGU[dT][dT] (SEQ | OSL56S | ACCCAAUACACCUGUGAUAAU[dT][dT] |
| A | ID NO: 242) | | (SEQ ID NO: 616) |
| OSL57 | AGUUCUUUGAGAUACACUGGU[dT][dT] (SEQ | OSL57S | ACCAGUGUAUCUCAAAGAACU[dT][dT] |
| A | ID NO: 243) | | (SEQ ID NO: 617) |
| OSL58 | UCGAAUUGCAGUUCUUUUCAU[dT][dT] (SEQ | OSL58S | AUGAAAAGAACUGCAAUUCGA[dT][dT] |
| A | ID NO: 244) | | (SEQ ID NO: 618) |
| OSL59 | UCAAUACAUCGAUGAUUGGGG[dT][dT] (SEQ | OSL59S | CCCCAAUCAUCGAUGUAUUGA[dT][dT] |
| A | ID NO: 245) | | (SEQ ID NO: 619) |
| OSL60 | AACGAUAGGUCAAUACAUCGA[dT][dT] (SEQ | OSL60S | UCGAUGUAUUGACCUAUCGUU[dT][dT] |
| A | ID NO: 246) | | (SEQ ID NO: 620) |
| OSL61 | ACAAACGAUAGGUCAAUACAU[dT][dT] (SEQ | OSL61S | AUGUAUUGACCUAUCGUUUGU[dT][dT] |
| A | ID NO: 247) | | (SEQ ID NO: 621) |
| OSL62 | UCAAAAACACCAUCACAACGA[dT][dT] (SEQ ID | OSL62S | UCGUUGUGAUGGUGUUUUUGA[dT][dT] |
| A | NO: 248) | | (SEQ ID NO: 622) |
| OSL63 | UCACAUUCCCAGAAGUUCGGG[dT][dT] (SEQ | OSL63S | CCCGAACUUCUGGGAAUGUGA[dT][dT] |
| A | ID NO: 249) | | (SEQ ID NO: 623) |
| OSL64 | AUCACAUUCCCAGAAGUUCGG[dT][dT] (SEQ | OSL64S | CCGAACUUCUGGGAAUGUGAU[dT][dT] |
| A | ID NO: 250) | | (SEQ ID NO: 624) |
| OSL65 | UGAUGAAGGGCAAGUCUUGGG[dT][dT] (SEQ | OSL65S | CCCAAGACUUGCCCUUCAUCA[dT][dT] |
| A | ID NO: 251) | | (SEQ ID NO: 625) |
| OSL66 | AGAAUCAUUGGCAAGUAAGAA[dT][dT] (SEQ | OSL66S | UUCUUACUUGCCAAUGAUUCU[dT][dT] |
| A | ID NO: 252) | | (SEQ ID NO: 626) |
| OSL67 | UAUCACAUUCAUCUAUGUCUU[dT][dT] (SEQ | OSL67S | AAGACAUAGAUGAAUGUGAUA[dT][dT] |
| A | ID NO: 253) | | (SEQ ID NO: 627) |
| OSL68 | AAUAUCACAUUCAUCUAUGUC[dT][dT] (SEQ | OSL68S | GACAUAGAUGAAUGUGAUAUU[dT][dT] |
| A | ID NO: 254) | | (SEQ ID NO: 628) |
| OSL69 | AACAUGUAGCCUGUAUCACAC[dT][dT] (SEQ | OSL69S | GUGUGAUACAGGCUACAUGUU[dT][dT] |
| A | ID NO: 255) | | (SEQ ID NO: 629) |
| OSL70 | UCACUUUCUAACAUGUAGCCU[dT][dT] (SEQ | OSL70S | AGGCUACAUGUUAGAAAGUGA[dT][dT] |
| A | ID NO: 256) | | (SEQ ID NO: 630) |
| OSL71 | AUCACUUUCUAACAUGUAGCC[dT][dT] (SEQ | OSL71S | GGCUACAUGUUAGAAAGUGAU[dT][dT] |
| A | ID NO: 257) | | (SEQ ID NO: 631) |
| OSL72 | AAUGUAAGAACCAUUCUCGAC[dT][dT] (SEQ | OSL72S | GUCGAGAAUGGUUCUUACAUU[dT][dT] |
| A | ID NO: 258) | | (SEQ ID NO: 632) |
| OSL73 | UACAAUGUAAGAACCAUUCUC[dT][dT] (SEQ | OSL73S | GAGAAUGGUUCUUACAUUGUA[dT][dT] |
| A | ID NO: 259) | | (SEQ ID NO: 633) |
| OSL74 | AAAAUCAACAGCUACAAUGUA[dT][dT] (SEQ | OSL74S | UACAUUGUAGCUGUUGAUUUU[dT][dT] |
| A | ID NO: 260) | | (SEQ ID NO: 634) |
| OSL75 | AUUGAAUCAAAAUCAACAGCU[dT][dT] (SEQ | OSL75S | AGCUGUUGAUUUUGAUUCAAU[dT][dT] |
| A | ID NO: 261) | | (SEQ ID NO: 635) |
| OSL76 | UAAUUGAAUCAAAAUCAACAG[dT][dT] (SEQ | OSL76S | CUGUUGAUUUUGAUUCAAUUA[dT][dT] |
| A | ID NO: 262) | | (SEQ ID NO: 636) |
| OSL77 | AAGAUACGACCACUAAUUGAA[dT][dT] (SEQ | OSL77S | UUCAAUUAGUGGUCGUAUCUU[dT][dT] |
| A | ID NO: 263) | | (SEQ ID NO: 637) |
| OSL78 | AGUUUCAGUCAAGAUGAUGCU[dT][dT] (SEQ | OSL78S | AGCAUCAUCUUGACUGAAACU[dT][dT] |
| A | ID NO: 264) | | (SEQ ID NO: 638) |
| OSL79 | AAUAGUUUCAGUCAAGAUGAU[dT][dT] (SEQ | OSL79S | AUCAUCUUGACUGAAACUAUU[dT][dT] |
| A | ID NO: 265) | | (SEQ ID NO: 639) |
| OSL80 | UAUUGCAAUAGUUUCAGUCAA[dT][dT] (SEQ | OSL80S | UUGACUGAAACUAUUGCAAUA[dT][dT] |
| A | ID NO: 266) | | (SEQ ID NO: 640) |
| OSL81 | UCUAUUGCAAUAGUUUCAGUC[dT][dT] (SEQ | OSL81S | GACUGAAACUAUUGCAAUAGA[dT][dT] |
| A | ID NO: 267) | | (SEQ ID NO: 641) |
| OSL82 | AAUCUAUUGCAAUAGUUUCAG[dT][dT] (SEQ | OSL82S | CUGAAACUAUUGCAAUAGAUU[dT][dT] |
| A | ID NO: 268) | | (SEQ ID NO: 642) |
| OSL83 | AUUUUGGAGACUUCAAUUGUU[dT][dT] (SEQ | OSL83S | AACAAUUGAAGUCUCCAAAAU[dT][dT] |
| A | ID NO: 269) | | (SEQ ID NO: 643) |
| OSL84 | UUAGGUUUUUACUAAUCAGCA[dT][dT] (SEQ | OSL84S | UGCUGAUUAGUAAAAACCUAA[dT][dT] |
| A | ID NO: 270) | | (SEQ ID NO: 644) |
| OSL85 | UCAUUCUGGGAUCUAAUGCUA[dT][dT] (SEQ | OSL85S | UAGCAUUAGAUCCCAGAAUGA[dT][dT] |
| A | ID NO: 271) | | (SEQ ID NO: 645) |
| OSL86 | UUCAUUCUGGGAUCUAAUGCU[dT][dT] (SEQ | OSL86S | AGCAUUAGAUCCCAGAAUGAA[dT][dT] |
| A | ID NO: 272) | | (SEQ ID NO: 646) |
| OSL87 | AGUAGAUGCUCAUUCAUUCUG[dT][dT] (SEQ | OSL87S | CAGAAUGAAUGAGCAUCUACU[dT][dT] |
| A | ID NO: 273) | | (SEQ ID NO: 647) |
| OSL88 | AUUAUAAUCACAAAAGUCCAU[dT][dT] (SEQ | OSL88S | AUGGACUUUUGUGAUUAUAAU[dT][dT] |
| A | ID NO: 274) | | (SEQ ID NO: 648) |
| OSL89 | UCCAUUAUAAUCACAAAAGUC[dT][dT] (SEQ | OSL89S | GACUUUUGUGAUUAUAAUGGA[dT][dT] |
| A | ID NO: 275) | | (SEQ ID NO: 649) |
| OSL90 | UGCCGUAUAAUCAAAUCAC[dT][dT] (SEQ ID | OSL90S | GUGUGAUUUGAUUAUACGGCA[dT][dT] |
| A | NO: 276) | | (SEQ ID NO: 650) |
| OSL91 | AUAUUAUACAUUACAACUGAC[dT][dT] (SEQ | OSL91S | GUCAGUUGUAAUGUAUAAUAU[dT][dT] |
| A | ID NO: 277) | | (SEQ ID NO: 651) |
| OSL92 | AUUGAAUAUUAUACAUUACAA[dT][dT] (SEQ | OSL92S | UUGUAAUGUAUAAUAUUCAAU[dT][dT] |
| A | ID NO: 278) | | (SEQ ID NO: 652) |
| OSL93 | AAUUUGGUUGUUUCGAAGGAU[dT][dT] (SEQ | OSL93S | AUCCUUCGAAACAACCAAAUU[dT][dT] |
| A | ID NO: 279) | | (SEQ ID NO: 653) |
| OSL94 | ACGGAAUUUGGUUGUUUCGAA[dT][dT] (SEQ | OSL94S | UUCGAAACAACCAAAUUCCGU[dT][dT] |
| A | ID NO: 280) | | (SEQ ID NO: 654) |
| OSL95 | UUACAGUUAUUAAGAAAGGUU[dT][dT] (SEQ | OSL95S | AACCUUUCUUAAUAACUGUAA[dT][dT] |
| A | ID NO: 281) | | (SEQ ID NO: 655) |
| OSL96 | UCCAAAAAUUAUAUGUUGCCU[dT][dT] (SEQ | OSL96S | AGGCAACAUAUAAUUUUUGGA[dT][dT] |
| A | ID NO: 282) | | (SEQ ID NO: 656) |
| OSL97 | UUCCAAAAAUUAUAUGUUGCC[dT][dT] (SEQ | OSL97S | GGCAACAUAUAAUUUUUGGAA[dT[dT] |
| A | ID NO: 283) | | (SEQ ID NO: 657) |
| OSL98 | UCUAAACCAUUCUGUAUCCCU[dT][dT] (SEQ | OSL98S | AGGGAUACAGAAUGGUUUAGA[dT][dT] |
| A | ID NO: 284) | | (SEQ ID NO: 658) |
| OSL99 | AUCUAAACCAUUCUGUAUCCC[dT][dT] (SEQ | OSL99S | GGGAUACAGAAUGGUUUAGAU[dT][dT] |
| A | ID NO: 285) | | (SEQ ID NO: 659) |
| OSL100 | UUCAACAUCUAAACCAUUCUG[dT][dT] (SEQ | OSL100 | CAGAAUGGUUUAGAUGUUGAA[dT[dT] |
| A | ID NO: 286) | S | (SEQ ID NO: 660) |
| OSL101 | AUUUUCAACCCAAUAGAUGUA[dT][dT] (SEQ | OSL101 | UACAUCUAUUGGGUUGAAAAU[dT][dT] |
| A | ID NO: 287) | S | (SEQ ID NO: 661) |
| OSL102 | UAUAGAAGCAAAUACUGUCCU[dT][dT] (SEQ | OSL102 | AGGACAGUAUUUGCUUCUAUA[dT][dT] |
| A | ID NO: 288) | S | (SEQ ID NO: 662) |
| OSL103 | UAGAUAUAGAAGCAAAUACUG[dT][dT] (SEQ | OSL103 | CAGUAUUUGCUUCUAUAUCUA[dT][dT] |
| A | ID NO: 289) | S | (SEQ ID NO: 663) |
| OSL104 | UAAGGCCAGGUUCAUAGAAGG[dT][dT] (SEQ | OSL104 | CCUUCUAUGAACCUGGCCU[dT][dT] (SEQ |
| A | ID NO: 290) | S | ID NO: 664) |
| OSL105 | UCUUGAAAUCCAAUCUAAGGC[dT][dT] (SEQ | OSL105 | GCCUUAGAUUGGAUUUCAAGA[dT][dT] |
| A | ID NO: 291) | S | (SEQ ID NO: 665) |
| OSL106 | AUAAAGGUUUCUUGAAAUCCA[dT][dT] (SEQ | OSL106 | UGGAUUUCAAGAAACCUUUAU[dT][dT] |
| A | ID NO: 292) | S | (SEQ ID NO: 666) |
| OSL107 | UCAAAACCUCGAUUGACUGAG[dT][dT] (SEQ | OSL107 | CUCAGUCAAUCGAGGUUUUGA[dT][dT] |
| A | ID NO: 293) | S | (SEQ ID NO: 667) |
| OSL108 | UUCUGUAUCUGAUAUCUCCGU[dT][dT] (SEQ | OSL108 | ACGGAGAUAUCAGAUACAGAA[dT][dT] |
| A | ID NO: 294) | S | (SEQ ID NO: 668) |
| OSL109 | UUUCUGUAUCUGAUAUCUCCG[dT][dT] (SEQ | OSL109 | CGGAGAUAUCAGAUACAGAAA[dT][dT] |
| A | ID NO: 295) | S | (SEQ ID NO: 669) |
| OSL110 | UUUUUCUGUAUCUGAUAUCUC[dT][dT] (SEQ | OSL110 | GAGAUAUCAGAUACAGAAAAA[dT][dT] |
| A | ID NO: 296) | S | (SEQ ID NO: 670) |
| OSL111 | AUCAAUGUUUUUCUGUAUCUG[dT][dT] (SEQ | OSL111 | CAGAUACAGAAAAACAUUGAU[dT][dT] |
| A | ID NO: 297) | S | (SEQ ID NO: 671) |
| OSL112 | AUAAAGGAAAGAAUCAUGGAC[dT][dT] (SEQ | OSL112 | GUCCAUGAUUCUUUCCUUUAU[dT][dT] |
| A | ID NO: 298) | S | (SEQ ID NO: 672) |
| OSL113 | AAUAAAGGAAAGAAUCAUGGA[dT][dT] (SEQ | OSL113 | UCCAUGAUUCUUUCCUUUAUU[dT][dT] |
| A | ID NO: 299) | S | (SEQ ID NO: 673) |
| OSL114 | UCAGUAUAAUAAAGGAAAGAA[dT][dT] (SEQ | OSL114 | UUCUUUCCUUUAUUAUACUGA[dT][dT] |
| A | ID NO: 300) | S | (SEQ ID NO: 674) |
| OSL115 | UUUCAAUGACCUCAUACUGUU[dT][dT] (SEQ | OSL115 | AACAGUAUGAGGUCAUUGAAA[dT][dT] |
| A | ID NO: 301) | S | (SEQ ID NO: 675) |
| OSL116 | AUUUGGAACAUUAUCUCUCAA[dT][dT] (SEQ | OSL116 | UUGAGAGAUAAUGUUCCAAAU[dT][dT] |
| A | ID NO: 302) | S | (SEQ ID NO: 676) |
| OSL117 | AGAUUUGGAACAUUAUCUCUC[dT][dT] (SEQ | OSL117 | GAGAGAUAAUGUUCCAAAUCU[dT][dT] |
| A | ID NO: 303) | S | (SEQ ID NO: 677) |
| OSL118 | UCAGAUUUGGAACAUUAUCUC[dT][dT] (SEQ | OSL118 | GAGAUAAUGUUCCAAAUCUGA[dT][dT] |
| A | ID NO: 304) | S | (SEQ ID NO: 678) |
| OSL119 | UUGCUACAGCCAUUUGAGG[dT][dT] (SEQ ID | OSL119 | CCUCAAAUGGCUGUAGCAA[dT][dT] (SEQ |
| A | NO: 305) | S | ID NO: 679) |
| OSL120 | AUGAAAGAGUUAUAUGGAGAG[dT][dT] (SEQ | OSL120 | CUCUCCAUAUAACUCUUUCAU[dT][dT] |
| A | ID NO: 306) | S | (SEQ ID NO: 680) |
| OSL121 | ACAAUGAAAGAGUUAUAUGGA[dT][dT] (SEQ | OSL121 | UCCAUAUAACUCUUUCAUUGU[dT][dT] |
| A | ID NO: 307) | S | (SEQ ID NO: 681) |
| OSL122 | UGAAACAACAAUGAAAGAGUU[dT][dT] (SEQ | OSL122 | AACUCUUUCAUUGUUGUUUCA[dT][dT] |
| A | ID NO: 308) | S | (SEQ ID NO: 682) |
| OSL123 | AUUGAAACAACAAUGAAAGAG[dT][dT] (SEQ | OSL123 | CUCUUUCAUUGUUGUUUCAAU[dT][dT] |
| A | ID NO: 309) | S | (SEQ ID NO: 683) |
| OSL124 | AGCUAAAGCCUCUGAUUGCAG[dT][dT] (SEQ | OSL124 | CUGCAAUCAGAGGCUUUAGCU[dT][dT] |
| A | ID NO: 310) | S | (SEQ ID NO: 684) |
| OSL125 | AAGCUAAAGCCUCUGAUUGCA[dT][dT] (SEQ | OSL125 | UGCAAUCAGAGGCUUUAGCUU[dT][dT] |
| A | ID NO: 311) | S | (SEQ ID NO: 685) |
| OSL126 | ACAAUUCCAAGCUAAAGCCUC[dT][dT] (SEQ | OSL126 | GAGGCUUUAGCUUGGAAUUGU[dT][dT] |
| A | ID NO: 312) | S | (SEQ ID NO: 686) |
| OSL127 | UGACAAUUCCAAGCUAAAGCC[dT][dT] (SEQ | OSL127 | GGCUUUAGCUUGGAAUUGUCA[dT][dT] |
| A | ID NO: 313) | S | (SEQ ID NO: 687) |
| OSL128 | UGAAUGAUCUGACAAUUCCAA[dT][dT] (SEQ | OSL128 | UUGGAAUUGUCAGAUCAUUCA[dT][dT] |
| A | ID NO: 314) | S | (SEQ ID NO: 688) |
| OSL129 | AUGUUCAUCAGAGAAGAUCCA[dT][dT] (SEQ | OSL129 | UGGAUCUUCUCUGAUGAACAU[dT][dT] |
| A | ID NO: 315) | S | (SEQ ID NO: 689) |
| OSL130 | UAUUCCAUGUGUCACAAUGUU[dT][dT] (SEQ | OSL130 | AACAUUGUGACACAUGGAAUA[dT][dT] |
| A | ID NO: 316) | S | (SEQ ID NO: 690) |
| OSL131 | ACUUCUAUCAGUGUUUCAGAA[dT][dT] (SEQ | OSL131 | UUCUGAAACACUGAUAGAAGU[dT][dT] |
| A | ID NO: 317) | S | (SEQ ID NO: 691) |
| OSL132 | UAUUGAUCCGCAGAACUUCUA[dT][dT] (SEQ | OSL132 | UAGAAGUUCUGCGGAUCAAUA[dT][dT] |
| A | ID NO: 318) | S | (SEQ ID NO: 692) |
| OSL133 | UGUUCUUGGGAUCUACAACAA[dT][dT] (SEQ | OSL133 | UUGUUGUAGAUCCCAAGAACA[dT][dT] |
| A | ID NO: 319) | S | (SEQ ID NO: 693) |
| OSL134 | AAAGAACGCUCAAUCUUUGGU[dT][dT] (SEQ | OSL134 | ACCAAAGAUUGAGCGUUCUUU[dT][dT] |
| A | ID NO: 320) | S | (SEQ ID NO: 694) |
| OSL135 | UAAACGUAGCCAUCACUUCGG[dT][dT] (SEQ | OSL135 | CCGAAGUGAUGGCUACGUUUA[dT][dT] |
| A | ID NO: 321) | S | (SEQ ID NO: 695) |
| OSL136 | AUCUAAAGAAUCAUCAACCCA[dT][dT] (SEQ | OSL136 | UGGGUUGAUGAUUCUUUAGAU[dT][dT] |
| A | ID NO: 322) | S | (SEQ ID NO: 696) |
| OSL137 | UUAUAUCUAAAGAAUCAUCAA[dT][dT] (SEQ | OSL137 | UUGAUGAUUCUUUAGAUAUAA[dT][dT] |
| A | ID NO: 323) | S | (SEQ ID NO: 697) |
| OSL138 | AUAGAAUUUUCAAAAACAGUG[dT][dT] (SEQ | OSL138 | CACUGUUUUUGAAAAUUCUAU[dT][dT] |
| A | ID NO: 324) | S | (SEQ ID NO: 698) |
| OSL139 | UGAUAGAAUUUUCAAAAACAG[dT][dT] (SEQ | OSL139 | CUGUUUUUGAAAAUUCUAUCA[dT][dT] |
| A | ID NO: 325) | S | (SEQ ID NO: 699) |
| OSL140 | UUUCAAAUUCCUAUCUACCCA[dT][dT] (SEQ | OSL140 | UGGGUAGAUAGGAAUUUGAAA[dT][dT] |
| A | ID NO: 326) | S | (SEQ ID NO: 700) |
| OSL141 | UUUUCAAAUUCCUAUCUACCC[dT][dT] (SEQ | OSL141 | GGGUAGAUAGGAAUUUGAAAA[dT][dT] |
| A | ID NO: 327) | S | (SEQ ID NO: 701) |
| OSL142 | AUAUUGUCUCUUAUCACUGUG[dT][dT] (SEQ | OSL142 | CACAGUGAUAAGAGACAAUAU[dT][dT] |
| A | ID NO: 328) | S | (SEQ ID NO: 702) |
| OSL143 | UGAUAUUGUCUCUUAUCACUG[dT][dT] (SEQ | OSL143 | CAGUGAUAAGAGACAAUAUCA[dT][dT] |
| A | ID NO: 329) | S | (SEQ ID NO: 703) |
| OSL144 | UGAAAUGGCACAAUUCUUGCC[dT][dT] (SEQ | OSL144 | GGCAAGAAUUGUGCCAUUUCA[dT][dT] |
| A | ID NO: 330) | S | (SEQ ID NO: 704) |
| OSL145 | UGUUGAAAUGGCACAAUUCUU[dT][dT] (SEQ | OSL145 | AAGAAUUGUGCCAUUUCAACA[dT][dT] |
| A | ID NO: 331) | S | (SEQ ID NO: 705) |
| OSL146 | AAUUUUCUGUUGAAAUGGCAC[dT][dT] (SEQ | OSL146 | GUGCCAUUUCAACAGAAAAUU[dT][dT] |
| A | ID NO: 332) | S | (SEQ ID NO: 706) |
| OSL147 | AAAUUUUCUGUUGAAAUGGCA[dT][dT] (SEQ | OSL147 | UGCCAUUUCAACAGAAAAUUU[dT][dT] |
| A | ID NO: 333) | S | (SEQ ID NO: 707) |
| OSL148 | AUUAGACAAGGCAAAGAUGAG[dT][dT] (SEQ | OSL148 | CUCAUCUUUGCCUUGUCUAAU[dT][dT] |
| A | ID NO: 334) | S | (SEQ ID NO: 708) |
| OSL149 | ACAUUUAUUGUUUGGAAAGGU[dT][dT] (SEQ | OSL149 | ACCUUUCCAAACAAUAAAUGU[dT][dT] |
| A | ID NO: 335) | S | (SEQ ID NO: 709) |
| OSL150 | AUCACUUACACUGUCAUAGUC[dT][dT] (SEQ | OSL150 | GACUAUGACAGUGUAAGUGAU[dT][dT] |
| A | ID NO: 336) | S | (SEQ ID NO: 710) |
| OSL151 | UAGAUUCUAUCACUUACACUG[dT][dT] (SEQ | OSL151 | CAGUGUAAGUGAUAGAAUCUA[dT][dT] |
| A | ID NO: 337) | S | (SEQ ID NO: 711) |
| OSL152 | AGUAGAUUCUAUCACUUACAC[dT][dT] (SEQ | OSL152 | GUGUAAGUGAUAGAAUCUACU[dT][dT] |
| A | ID NO: 338) | S | (SEQ ID NO: 712) |
| OSL153 | UUUUGUGUGAAGUAGAUUCUA[dT][dT] (SEQ | OSL153 | UAGAAUCUACUUCACACAAAA[dT][dT] |
| A | ID NO: 339) | S | (SEQ ID NO: 713) |
| OSL154 | UAAAUUUUGUGUGAAGUAGAU[dT][dT] (SEQ | OSL154 | AUCUACUUCACACAAAAUUUA[dT][dT] |
| A | ID NO: 340) | S | (SEQ ID NO: 714) |
| OSL155 | UCUAGUAAUCCAGUCAAAGGC[dT][dT] (SEQ | OSL155 | GCCUUUGACUGGAUUACUAGA[dT][dT] |
| A | ID NO: 341) | S | (SEQ ID NO: 715) |
| OSL156 | AAUUCUUCUAGUAAUCCAGUC[dT][dT] (SEQ | OSL156 | GACUGGAUUACUAGAAGAAUU[dT][dT] |
| A | ID NO: 342) | S | (SEQ ID NO: 716) |
| OSL157 | UAAAUUCUUCUAGUAAUCCAG[dT][dT] (SEQ | OSL157 | CUGGAUUACUAGAAGAAUUUA[dT][dT] |
| A | ID NO: 343) | S | (SEQ ID NO: 717) |
| OSL158 | AUAAAUUCUUCUAGUAAUCCA[dT][dT] (SEQ | OSL158 | UGGAUUACUAGAAGAAUUUAU[dT][dT] |
| A | ID NO: 344) | S | (SEQ ID NO: 718) |
| OSL159 | AUAUACUGGCCAUAGAGAGUC[dT][dT] (SEQ | OSL159 | GACUCUCUAUGGCCAGUAUAU[dT][dT] |
| A | ID NO: 345) | S | (SEQ ID NO: 719) |
| OSL160 | UUCUUUGUGUGUACAAGUCAG[dT][dT] (SEQ | OSL160 | CUGACUUGUACACACAAAGAA[dT][dT] |
| A | ID NO: 346) | S | (SEQ ID NO: 720) |
| OSL161 | AAUUCUUUGUGUGUACAAGUC[dT][dT] (SEQ | OSL161 | GACUUGUACACACAAAGAAUU[dT][dT] |
| A | ID NO: 347) | S | (SEQ ID NO: 721) |
| OSL162 | UCGGUAAAUUCUUUGUGUGUA[dT][dT] (SEQ | OSL162 | UACACACAAAGAAUUUACCGA[dT][dT] |
| A | ID NO: 348) | S | (SEQ ID NO: 722) |
| OSL163 | UGUUACACUGUUGUUUCUGGU[dT][dT] (SEQ | OSL163 | ACCAGAAACAACAGUGUAACA[dT][dT] |
| A | ID NO: 349) | S | (SEQ ID NO: 723) |
| OSL164 | AUUGUUACACUGUUGUUUCUG[dT][dT] (SEQ | OSL164 | CAGAAACAACAGUGUAACAAU[dT][dT] |
| A | ID NO: 350) | S | (SEQ ID NO: 724) |
| OSL165 | AAACUGUUCACAAGGAUUGUU[dT][dT] (SEQ | OSL165 | AACAAUCCUUGUGAACAGUUU[dT][dT] |
| A | ID NO: 351) | S | (SEQ ID NO: 725) |
| OSL166 | ACAUCGUUCACCAUUGUCCAC[dT][dT] (SEQ | OSL166 | GUGGACAAUGGUGAACGAUGU[dT][dT] |
| A | ID NO: 352) | S | (SEQ ID NO: 726) |
| OSL167 | UGUUAUUGCACAUAAACUCCG[dT][dT] (SEQ | OSL167 | CGGAGUUUAUGUGCAAUAACA[dT][dT] |
| A | ID NO: 353) | S | (SEQ ID NO: 727) |
| OSL168 | UCUGUUAUUGCACAUAAACUC[dT][dT] (SEQ | OSL168 | GAGUUUAUGUGCAAUAACAGA[dT][dT] |
| A | ID NO: 354) | S | (SEQ ID NO: 728) |
| OSL169 | UUAUGACAUUUUGUGUAUCCA[dT][dT] (SEQ | OSL169 | UGGAUACACAAAAUGUCAUAA[dT][dT] |
| A | ID NO: 355) | S | (SEQ ID NO: 729) |
| OSL170 | UGAAUUAUGACAUUUUGUGUA[dT][dT] (SEQ | OSL170 | UACACAAAAUGUCAUAAUUCA[dT][dT] |
| A | ID NO: 356) | S | (SEQ ID NO: 730) |
| OSL171 | UUUGAAUUAUGACAUUUUGUG[dT][dT] (SEQ | OSL171 | CACAAAAUGUCAUAAUUCAAA[dT][dT] |
| A | ID NO: 357) | S | (SEQ ID NO: 731) |
| OSL172 | UACAAAUAUUUGAAUUAUGAC[dT][dT] (SEQ | OSL172 | GUCAUAAUUCAAAUAUUUGUA[dT][dT] |
| A | ID NO: 358) | S | (SEQ ID NO: 732) |
| OSL173 | AAAUAAACGCGAGGAAUACAA[dT][dT] (SEQ | OSL173 | UUGUAUUCCUCGCGUUUAUUU[dT][dT] |
| A | ID NO: 359) | S | (SEQ ID NO: 733) |
| OSL174 | AAUAAGUAGGGUUUUCAUCAC[dT][dT] (SEQ | OSL174 | GUGAUGAAAACCCUACUUAUU[dT][dT] |
| A | ID NO: 360) | S | (SEQ ID NO: 734) |
| OSL175 | UCACAAUACCAAUGUUGAGGA[dT][dT] (SEQ | OSL175 | UCCUCAACAUUGGUAUUGUGA[dT][dT] |
| A | ID NO: 361) | S | (SEQ ID NO: 735) |
| OSL176 | UGUUUCUUGAUCACAAUACCA[dT][dT] (SEQ | OSL176 | UGGUAUUGUGAUCAAGAAACA[dT][dT] |
| A | ID NO: 362) | S | (SEQ ID NO: 736) |
| OSL177 | AACAAUCUGUUUCUUGAUCAC[dT][dT] (SEQ | OSL177 | GUGAUCAAGAAACAGAUUGUU[dT][dT] |
| A | ID NO: 363) | S | (SEQ ID NO: 737) |
| OSL178 | UUUACACAGAGAAACUCGGAA[dT][dT] (SEQ | OSL178 | UUCCGAGUUUCUCUGUGUAAA[dT][dT] |
| A | ID NO: 364) | S | (SEQ ID NO: 738) |
| OSL179 | AUUUACACAGAGAAACUCGGA[dT][dT] (SEQ | OSL179 | UCCGAGUUUCUCUGUGUAAAU[dT][dT] |
| A | ID NO: 365) | S | (SEQ ID NO: 739) |
| OSL180 | UUCUGAUUCUCAUCGUAGCCG[dT][dT] (SEQ | OSL180 | CGGCUACGAUGAGAAUCAGAA[dT][dT] |
| A | ID NO: 366) | S | (SEQ ID NO: 740) |
| OSL181 | AUUUUCAGAGCAAGUUCUCCU[dT][dT] (SEQ | OSL181 | AGGAGAACUUGCUCUGAAAAU[dT][dT] |
| A | ID NO: 367) | S | (SEQ ID NO: 741) |
| OSL182 | AUAUCUUUGGGAUACACAGUC[dT][dT] (SEQ | OSL182 | GACUGUGUAUCCCAAAGAUAU[dT][dT] |
| A | ID NO: 368) | S | (SEQ ID NO: 742) |
| OSL183 | AGGUAAACUGAUUCUGUUGGC[dT][dT] (SEQ | OSL183 | GCCAACAGAAUCAGUUUACCU[dT][dT] |
| A | ID NO: 369) | S | (SEQ ID NO: 743) |
| OSL184 | AUAGAAACUGGUUAAGGUGUC[dT][dT] (SEQ | OSL184 | GACACCUUAACCAGUUUCUAU[dT][dT] |
| A | ID NO: 370) | S | (SEQ ID NO: 744) |
| OSL185 | ACAAUAGAAACUGGUUAAGGU[dT][dT] (SEQ | OSL185 | ACCUUAACCAGUUUCUAUUGU[dT][dT] |
| A | ID NO: 371) | S | (SEQ ID NO: 745) |
| OSL186 | UCAUCAAUAUCAACACAAGUC[dT][dT] (SEQ | OSL186 | GACUUGUGUUGAUAUUGAUGA[dT][dT] |
| A | ID NO: 372) | S | (SEQ ID NO: 746) |
| OSL187 | AGAUGUAGGAGCCUAUUACAU[dT][dT] (SEQ | OSL187 | AUGUAAUAGGCUCCUACAUCU[dT][dT] |
| A | ID NO: 373) | S | (SEQ ID NO: 747) |
| OSL188 | UCGAUGUUACUGUUUUGCCGG[dT][dT] (SEQ | OSL188 | CCGGCAAAACAGUAACAUCGA[dT][dT] |
| A | ID NO: 374) | S | (SEQ ID NO: 748) |
| OSL189 | UUGCUAAAAAUGAGAUAGGGU[dT][dT] (SEQ | OSL189 | ACCCUAUCUCAUUUUUAGCAA[dT][dT] |
| A | ID NO: 375) | S | (SEQ ID NO: 749) |
| OSL190 | AUUUCUCAAAUAGUAACGGUU[dT][dT] (SEQ | OSL190 | AACCGUUACUAUUUGAGAAAU[dT][dT] |
| A | ID NO: 376) | S | (SEQ ID NO: 750) |
| OSL191 | AAUUUCUCAAAUAGUAACGGU[dT][dT] (SEQ | OSL191 | ACCGUUACUAUUUGAGAAAUU[dT][dT] |
| A | ID NO: 377) | S | (SEQ ID NO: 751) |
| OSL192 | AAAUUUCUCAAAUAGUAACGG[dT][dT] (SEQ | OSL192 | CCGUUACUAUUUGAGAAAUUU[dT][dT] |
| A | ID NO: 378) | S | (SEQ ID NO: 752) |
| OSL193 | AGUUAAAUUUCUCAAAUAGUA[dT][dT] (SEQ | OSL193 | UACUAUUUGAGAAAUUUAACU[dT][dT] |
| A | ID NO: 379) | S | (SEQ ID NO: 753) |
| OSL194 | AUCUAUAGUUAAAUUUCUCAA[dT][dT] (SEQ | OSL194 | UUGAGAAAUUUAACUAUAGAU[dT][dT] |
| A | ID NO: 380) | S | (SEQ ID NO: 754) |
| OSL195 | UAAAAAUAGCCAUCUAUAGUU[dT][dT] (SEQ | OSL195 | AACUAUAGAUGGCUAUUUUUA[dT][dT] |
| A | ID NO: 381) | S | (SEQ ID NO: 755) |
| OSL196 | AUCUAAUGCCACAACAUUGUC[dT][dT] (SEQ | OSL196 | GACAAUGUUGUGGCAUUAGAU[dT][dT] |
| A | ID NO: 382) | S | (SEQ ID NO: 756) |
| OSL197 | AAUCCAAUACAAUCUCUUCUC[dT][dT] (SEQ | OSL197 | GAGAAGAGAUUGUAUUGGAUU[dT][dT] |
| A | ID NO: 383) | S | (SEQ ID NO: 757) |
| OSL198 | ACAUUCUCUCAAUGACUUGCC[dT][dT] (SEQ | OSL198 | GGCAAGUCAUUGAGAGAAUGU[dT][dT] |
| A | ID NO: 384) | S | (SEQ ID NO: 758) |
| OSL199 | AUGAUUGUCUCCUUGUUUGUC[dT][dT] (SEQ | OSL199 | GACAAACAAGGAGACAAUCAU[dT][dT] |
| A | ID NO: 385) | S | (SEQ ID NO: 759) |
| OSL200 | AUUAUCACAGACUUGUUGGUU[dT][dT] (SEQ | OSL200 | AACCAACAAGUCUGUGAUAAU[dT][dT] |
| A | ID NO: 386) | S | (SEQ ID NO: 760) |
| OSL201 | UUCAAAAAUGGUAAUAGCGAA[dT][dT] (SEQ | OSL201 | UUCGCUAUUACCAUUUUUGAA[dT][dT] |
| A | ID NO: 387) | S | (SEQ ID NO: 761) |
| OSL202 | UCUUCAAAAAUGGUAAUAGCG[dT][dT] (SEQ | OSL202 | CGCUAUUACCAUUUUUGAAGA[dT][dT] |
| A | ID NO: 388) | S | (SEQ ID NO: 762) |
| OSL203 | AUUUGUUUCCCUUUUCCACUG[dT][dT] (SEQ | OSL203 | CAGUGGAAAAGGGAAACAAAU[dT][dT] |
| A | ID NO: 389) | S | (SEQ ID NO: 763) |
| OSL204 | AUUUGAUCCAUCAUAUUUGUU[dT][dT] (SEQ | OSL204 | AACAAAUAUGAUGGAUCAAAU[dT][dT] |
| A | ID NO: 390) | S | (SEQ ID NO: 764) |
| OSL205 | UAUAUGGAUGGUACACAUGGA[dT][dT] (SEQ | OSL205 | UCCAUGUGUACCAUCCAUAUA[dT][dT] |
| A | ID NO: 391) | S | (SEQ ID NO: 765) |
| OSL206 | AAAGAAGACGGUCUUCAUCAG[dT][dT] (SEQ | OSL206 | CUGAUGAAGACCGUCUUCUUU[dT][dT] |
| A | ID NO: 392) | S | (SEQ ID NO: 766) |
| OSL207 | UGAAUUCUGUGAAGUUGUCAC[dT][dT] (SEQ | OSL207 | GUGACAACUUCACAGAAUUCA[dT][dT] |
| A | ID NO: 393) | S | (SEQ ID NO: 767) |
| OSL208 | ACAAUGUCCACUUGUACACUG[dT][dT] (SEQ | OSL208 | CGGUGUACAAGUGGACAUUGU[dT][dT] |
| A | ID NO: 394) | S | (SEQ ID NO: 768) |
| OSL209 | ACACAAUGUCCACUUGUACAC[dT][dT] (SEQ | OSL209 | GUGUACAAGUGGACAUUGUGU[dT][dT] |
| A | ID NO: 395) | S | (SEQ ID NO: 769) |
| OSL210 | UUUUUGCAUUCGAACAUAGUA[dT][dT] (SEQ | OSL210 | UACUAUGUUCGAAUGCAAAAA[dT][dT] |
| A | ID NO: 396) | S | (SEQ ID NO: 770) |
| OSL211 | AUGGUUUUUGCAUUCGAACAU[dT][dT] (SEQ | OSL211 | AUGUUCGAAUGCAAAAACCAU[dT][dT] |
| A | ID NO: 397) | S | (SEQ ID NO: 771) |
| OSL212 | AUACAAACAUGGUUUUUGCAU[dT][dT] (SEQ | OSL212 | AUGCAAAAACCAUGUUUGUAU[dT][dT] |
| A | ID NO: 398) | S | (SEQ ID NO: 772) |
| OSL213 | AUCACAUUUCCAAUAUGGCGG[dT][dT] (SEQ | OSL213 | CCGCCAUAUUGGAAAUGUGAU[dT][dT] |
| A | ID NO: 399) | S | (SEQ ID NO: 773) |
| OSL214 | UGAAGUUCUUCAUCUGAACCA[dT][dT] (SEQ | OSL214 | UGGUUCAGAUGAAGAACUUCA[dT][dT] |
| A | ID NO: 400) | S | (SEQ ID NO: 774) |
| OSL215 | AUAAAUGCAGCGAUUGUUGUC[dT][dT] (SEQ | OSL215 | GACAACAAUCGCUGCAUUUAU[dT][dT] |
| A | ID NO: 401) | S | (SEQ ID NO: 775) |
| OSL216 | AUUCUGUACAAGGUUUAGGGG[dT][dT] (SEQ | OSL216 | CCCCUAAACCUUGUACAGAAU[dT][dT] |
| A | ID NO: 402) | S | (SEQ ID NO: 776) |
| OSL217 | UAUUCUGUACAAGGUUUAGGG[dT][dT] (SEQ | OSL217 | CCCUAAACCUUGUACAGAAUA[dT][dT] |
| A | ID NO: 403) | S | (SEQ ID NO: 777) |
| OSL218 | AUUCAUAUUCUGUACAAGGUU[dT][dT] (SEQ | OSL218 | AACCUUGUACAGAAUAUGAAU[dT][dT] |
| A | ID NO: 404) | S | (SEQ ID NO: 778) |
| OSL219 | UAUUCAUAUUCUGUACAAGGU[dT][dT] (SEQ | OSL219 | ACCUUGUACAGAAUAUGAAUA[dT][dT] |
| A | ID NO: 405) | S | (SEQ ID NO: 779) |
| OSL220 | UUAUAUUCAUAUUCUGUACAA[dT][dT] (SEQ | OSL220 | UUGUACAGAAUAUGAAUAUAA[dT][dT] |
| A | ID NO: 406) | S | (SEQ ID NO: 780) |
| OSL221 | UAUUGCAACCCAGUUCAUCGG[dT][dT] (SEQ | OSL221 | CCGAUGAACUGGGUUGCAAUA[dT][dT] |
| A | ID NO: 407) | S | (SEQ ID NO: 781) |
| OSL222 | AUAUUUUCAGCACAUGUUCUU[dT][dT] (SEQ | OSL222 | AAGAACAUGUGCUGAAAAUAU[dT][dT] |
| A | ID NO: 408) | S | (SEQ ID NO: 782) |
| OSL223 | UUAAUUGGGUACAAUUUUGCU[dT][dT] (SEQ | OSL223 | AGCAAAAUUGUACCCAAUUAA[dT][dT] |
| A | ID NO: 409) | S | (SEQ ID NO: 783) |
| OSL224 | AAAAACAUUGGUUUCGAACCC[dT][dT] (SEQ | OSL224 | GGGUUCGAAACCAAUGUUUUU[dT][dT] |
| A | ID NO: 410) | S | (SEQ ID NO: 784) |
| OSL225 | UGUCAAAAACAUUGGUUUCGA[dT][dT] (SEQ | OSL225 | UCGAAACCAAUGUUUUUGACA[dT][dT] |
| A | ID NO: 411) | S | (SEQ ID NO: 785) |
| OSL226 | UUCGAAUUCGGACAUUGUCAG[dT][dT] (SEQ | OSL226 | CUGACAAUGUCCGAAUUCGAA[dT][dT] |
| A | ID NO: 412) | S | (SEQ ID NO: 786) |
| OSL227 | AUUAUAUUUUCGAAUUCGGAC[dT][dT] (SEQ | OSL227 | GUCCGAAUUCGAAAAUAUAAU[dT][dT] |
| A | ID NO: 413) | S | (SEQ ID NO: 787) |
| OSL228 | AGAUUAUAUUUUCGAAUUCGG[dT][dT] (SEQ | OSL228 | CCGAAUUCGAAAAUAUAAUCU[dT][dT] |
| A | ID NO: 414) | S | (SEQ ID NO: 788) |
| OSL229 | UCAUCUUGAAGAUACUCUGAG[dT][dT] (SEQ | OSL229 | CUCAGAGUAUCUUCAAGAUGA[dT][dT] |
| A | ID NO: 415) | S | (SEQ ID NO: 789) |
| OSL230 | UAUAUUCCUCAUCUUGAAGAU[dT][dT] (SEQ | OSL230 | AUCUUCAAGAUGAGGAAUAUA[dT][dT] |
| A | ID NO: 416) | S | (SEQ ID NO: 790) |
| OSL231 | UUUGAUAGCACCAAACCUAGAGCCC[dT][dT] | OSL231 | GGGCUCUAGGUUUGGUGCUAUCAAA[dT] |
| A-1 | (SEQ ID NO: 417) | S-1 | [dT] (SEQ ID NO: 791) |
| OSL231 | UUUGAUAGCACCAAACCUAGAGCCC[dT]*[dT] | OSL231 | GGGCUCUAGGUUUGGUGCUAUCAAA[dT]* |
| A-2 | (SEQ ID NO: 418) | S-2 | [dT] (SEQ ID NO: 792) |
| OSL231 | [mU][mU][mU][mG][mA][mU][mA][mG][mC][ | OSL231 | [mG][mG][mG][mC][mU][mC][mU][mA][m |
| A-3 | mA][mC][mC][mA][mA][mA][mC][mC][mU][ | S-3 | G][mG][mU][mU][mU][mG][mG][mU][mG] |
| | mA][mG][mA][mG][mC][mC][mC][dT]*[dT] | | [mC][mU][mA][mU][mC][mA][mA][mA][dT] |
| | (SEQ ID NO: 419) | | *[dT] (SEQ ID NO: 793) |
| OSL231 | [mU][mU][mU][mG][mA][mU][mA][mG][mC][ | OSL231 | [mG][mG][mG][mC][mU][mC][mU][mA][m |
| A-4 | mA][mC][mC][mA][mA][mA][mC][mC][mU][ | S-4 | G][mG][mU][mU][mU][mG][mG][mU][mG] |
| | mA][mG][mA][mG][mC][mC][mC][dT]*[dT] | | [mC][mU][mA][mU][mC][mA][mA][mA] |
| | (SEQ ID NO: 420) | | (SEQ ID NO: 794) |
| OSL231 | [mU][mU][mU][mG][mA][mU][mA][mG][mC][ | OSL231 | [mG][mG][mG][mC][mU][mC][mU][mA][m |
| A-5 | mA][mC][mC][mA][mA][mA][mC][mC][mU][ | S-5 | G][mG][mU][mU][mU][mG][mG][mU][mG] |
| | mA][mG][mA][mG][mC][mC][mC] (SEQ ID | | [mC][mU][mA][mU][mC][mA][mA][mA][dT] |
| | NO: 421) | | *[dT] (SEQ ID NO: 795) |
| OSL231 | [mU][mU][mU][mG][mA][mU][mA][mG][mC][ | OSL231 | [mG][mG][mG][mC][mU][mC][mU][mA][m |
| A-6 | mA][mC][mC][mA][mA][mA][mC][mC][mU][ | S-6 | G][mG][mU][mU][mU][mG][mG][mU][mG] |
| | mA][mG][mA][mG][mC][mC][mC] (SEQ ID | | [mC][mU][mA][mU][mC][mA][mA][mA] |
| | NO: 422) | | (SEQ ID NO: 796) |
| OSL231 | [mU][mU][mU][mG][mA][mU][mA][mG][mC][ | OSL231 | GGGCUCUAGGUUUGGUGCUAUCAAA[dT]* |
| A-7 | mA][mC][mC][mA][mA][mA][mC][mC][mU][ | S-7 | [dT] (SEQ ID NO: 797) |
| | mA][mG][mA][mG][mC][mC][mC][dT]*[dT] | | |
| | (SEQ ID NO: 423) | | |
| OSL231 | [mU][2fU][mU][2fG][mA][2fU][mA][2fG] | OSL231 | [2fG][mG][2fG][mC][2fU][mC][2fU][mA] |
| A-8 | [mC][2fA][mC][2fC][mA][2fA][mA][2fC] | S-8 | [2fG][mG][2fU][mU][2fU][mG][2fG][mU] |
| | [mC][2fU][mA][2fG][mA][2fG][mC][2fC] | | [2fG][mC][2fU][mA][2fU][mC][2fA][mA] |
| | [mC][dT]*[dT] (SEQ ID NO: 424) | | [2fA][dT]*[dT] (SEQ ID NO: 798) |
| OSL231 | [mU][2fU][mU][2fG][mA][2fU][mA][2fG] | OSL231 | [2fG][mG][2fG][mC][2fU][mC][2fU][mA] |
| A-9 | [mC][2fA][mC][2fC][mA][2fA][mA][2fC] | S-9 | [2fG][mG][2fU][mU][2fU][mG][2fG][mU] |
| | [mC][2fU][mA][2fG][mA][2fG][mC][2fC] | | [2fG][mC][2fU][mA][2fU][mC][2fA][mA] |
| | [mC] (SEQ ID NO: 425) | | [2fA][dT]*[dT] (SEQ ID NO: 799) |
| OSL231 | [mU][2fU][mU][2fG][mA][2fU][mA][2fG] | OSL231 | [2fG][mG][2fG][mC][2fU][mC][2fU][mA] |
| A-10 | [mC][2fA][mC][2fC][mA][2fA][mA][2fC] | S-10 | [2fG][mG][2fU][mU][2fU][mG][2fG][mU] |
| | [mC][2fU][mA][2fG][mA][2fG][mC][2fC] | | [2fG][mC][2fU][mA][2fU][mC][2fA][mA] |
| | [mC][dT]*[dT] (SEQ ID NO: 426) | | [2fA] (SEQ ID NO: 800) |
| OSL231 | [mU][2fU][mU][2fG][mA][2fU][mA][2fG] | OSL231 | [2fG][mG][2fG][mC][2fU][mC][2fU][mA] |
| A-11 | [mC][2fA][mC][2fC][mA][2fA][mA][2fC] | S-11 | [2fG][mG][2fU][mU][2fU][mG][2fG][mU] |
| | [mC][2fU][mA][2fG][mA][2fC][mC][2fC] | | [2fG][mC][2fU][mA][2fU][mC][2fA][mA] |
| | [mC] (SEQ ID NO: 427) | | [2fA] (SEQ ID NO: 801) |
| OSL231 | [2fU][mU][2fU][mG][2fA][mU][2fA][mG] | OSL231 | [mG][2fG][mG][2fC][mU][2fC][mU][2fA] |
| A-12 | [2fC][mA][2fC][mC][2fA][mA][2fA][mC] | S-12 | [mG][2fG][mU][2fU][mU][2fG][mG][2Fu] |
| | [2fC][mU][2fA][mG][2fA][mG][2fC][mC] | | [mG][2fC][mU][2fA][mU][2fC][mA][2fA] |
| | [2fC][dT]*[dT] (SEQ ID NO: 428) | | [mA][dT]*[dT] (SEQ ID NO: 802) |
| OSL231 | [mU][2fA][mU][2fC][mA][2fA][mA][2fC] | OSL231 | [2fG][mG][2fG][mC][2fU][mC][2fU][mA] |
| A-13 | [mC][2fU][mC][2fG][mA][2fU][mA][2fG] | S-13 | [2fG][mG][2fU][mU][2fU][mG][2fG][mU] |
| | [mC][2fA][mA][2fC][mA][2fC][mC][2fG] | | [2fG][mC][2fU][mA][2fU][mC][2fA][mA] |
| | [mC] (SEQ I DNO: 429) | | [2fA]-LINKER-LIG (SEQ ID NO: 803) |
| OSL231 | [mU][2fU][2fU][2fG][2fA][2fU][2fA][2fG] | OSL231 | [2fU][mC][2fU][mA][2fG][mG][2fU][mU] |
| A-14 | [2fC][2fA][2fC][2fC][2fA][2fA][2fA] | S-14 | [2fU][mG][2fG][mU][2fG][mC][2fU][mA] |
| | [2fC][2fC][2fU][2fA][2fG][2fA][2fG] | | [2fU][mC][2fA][mA][2fA][dT]*[dT] |
| | [2fC][2fC][2fC][dT]*[dT] (SEQ ID | | (SEQ ID NO: 804) |
| | NO: 430) | | |
| OSL231 | [mU][2fU][2fU][2fG][2fA][2fU][2fA][2fG] | OSL231 | [2fU][mU][2fU][mG][2fG][mU][2fG][mC] |
| A-15 | [2fC][2fA][2fC][2fC][2fA][2fA][2fA] | S-15 | [2fU][mA][2fU][mC][2fA][mA][2fA][dT] |
| | [2fC][2fC][2fU][2fA][2fG][2fA][2fG] | | *[dT] (SEQ ID NO: 805) |
| | [2fC][2fC][2fC][dT]*[dT] (SEQ ID | | |
| | NO: 431) | | |
| OSL231 | [mU][2fU][mU][2fG][mA][2fU][mA][2fG] | OSL231 | [2fU][mU][2fU][mG][2fG][mU][2fG][mC] |
| A-16 | [mC][2fA][mC][2fC][mA][2fA][mA][2fC] | S-16 | [2fU][mA][2fU][mC][2fA][mA][2fA][dT] |
| | [mC][2fU][mA][2fG][mA][2fG][mC][2fC] | | *[dT] (SEQ ID NO: 806) |
| | [mC][dT]*[dT] (SEQ ID NO: 432) | | |
| OSL231 | [mU][2fU][mU][2fG][mA][2fU][mA][2fG] | OSL231 | [2fU][mU][2fU][mG][2fG][mU][2fG][mC] |
| A-17 | [mC][2fA][mC][2fC][mA][2fA][mA][2fC] | S-17 | [2fU][mA][2fU][mC][2fA][mA][2fA] |
| | [mC][2fU][mA][2fG][mA][2fG][mC] (SEQ | | (SEQ ID NO: 807) |
| | ID NO: 433) | | |
| OSL231 | [mU][2fU][mU][2fG][mA][2fU][mA][2fG] | OSL231 | [2fU][mU][2fU][mG][2fG][mU][2fG][mC] |
| A-18 | [mC][2fA][mC][2fC][mA][2fA][mA][2fC] | S-18 | [2fU][mA][2fU][mC][2fA][mA][2fA] |
| | [2fC][2fU][2fA][2fG][2fA][2fG][2fC] | | (SEQ ID NO: 808) |
| | (SEQ ID NO: 434) | | |
| OSL232 | UCAAAGUUGGGGAUGUAGGCA[dT][dT] (SEQ | OSL232 | UGCCUACAUCCCCAACUUUGA[dT][dT] |
| A | ID NO: 435) | S | (SEQ ID NO: 809) |
| OSL233 | UCAGUUUCAGGUCAACUUCCU[dT][dT] (SEQ | OSL233 | AGGAAGUUGACCUGAAACUGA[dT][dT] |
| A | ID NO: 436) | S | (SEQ ID NO: 810) |
| OSL234 | UACGUAUUUCAGUUUCAGGUC[dT][dT] (SEQ | OSL234 | GACCUGAAACUGAAAUACGUA[dT][dT] |
| A | ID NO: 437) | S | (SEQ ID NO: 811) |
| OSL235 | UUACGUAUUUCAGUUUCAGGU[dT][dT] (SEQ | OSL235 | ACCUGAAACUGAAAUACGUAA[dT][dT] |
| A | ID NO: 438) | S | (SEQ ID NO: 812) |
| OSL236 | AGUUUAGCCACCUCAAUGCGU[dT][dT] (SEQ | OSL236 | ACGCAUUGAGGUGGCUAAACU[dT][dT] |
| A | ID NO: 439) | S | (SEQ ID NO: 813) |
| OSL237 | AACAUAAGCCCUAGUUUGGGA[dT][dT] (SEQ | OSL237 | UCCCAAACUAGGGCUUAUGUU[dT][dT] |
| A | ID NO: 440) | S | (SEQ ID NO: 814) |
| OSL238 | UCGAUUUUAGGUUCCUUUCCC[dT][dT] (SEQ | OSL238 | GGGAAAGGAACCUAAAAUCGA[dT][dT] |
| A | ID NO: 441) | S | (SEQ ID NO: 815) |
| OSL239 | UCGAAAACCAGGAUGUUGCGG[dT][dT] (SEQ | OSL239 | CCGCAACAUCCUGGUUUUCGA[dT][dT] |
| A | ID NO: 442) | S | (SEQ ID NO: 816) |
| OSL240 | UCAAAUAAUCGAUAGAAAGGC[dT][dT] (SEQ | OSL240 | GCCUUUCUAUCGAUUAUUUGA[dT][dT] |
| A | ID NO: 443) | S | (SEQ ID NO: 817) |
| OSL241 | UUGUUCAAAUAAUCGAUAGAA[dT][dT] (SEQ | OSL241 | UUCUAUCGAUUAUUUGAACAA[dT][dT] |
| A | ID NO: 444) | S | (SEQ ID NO: 818) |
| OSL242 | UUAUGGUUUCAAUAACGUCCU[dT][dT] (SEQ | OSL242 | AGGACGUUAUUGAAACCAUAA[dT][dT] |
| A | ID NO: 445) | S | (SEQ ID NO: 819) |
| OSL243 | UUUUAUGGUUUCAAUAACGUC[dT][dT] (SEQ | OSL243 | GACGUUAUUGAAACCAUAAAA[dT][dT] |
| A | ID NO: 446) | S | (SEQ ID NO: 820) |
| OSL244 | AUUUUAUGGUUUCAAUAACGU[dT][dT] (SEQ | OSL244 | ACGUUAUUGAAACCAUAAAAU[dT][dT] |
| A | ID NO: 447) | S | (SEQ ID NO: 821) |
| OSL245 | UUUGCAAUGACUCUCCUAUCAGUCC[dT][dT] | OSL245 | GGACUGAUAGGAGAGUCAUUGCAAA[dT][dT] |
| A-1 | (SEQ ID NO: 448) | S-1 | (SEQ ID NO: 822) |
| OSL245 | UUUGCAAUGACUCUCCUAUCAGUCC[dT]*[dT] | OSL245 | GGACUGAUAGGAGAGUCAUUGCAA]A[dT] |
| A-2 | (SEQ ID NO: 449) | S-2 | *[dT] (SEQ ID NO: 823) |
| OSL245 | [mU][mU][mU][mG][mC][mA][mA][mU][mG][ | OSL245 | [mG][mG][mA][mC][mU][mG][mA][mU][m |
| A-3 | mA][mC][mU][mC][mU][mC][mC][mU][mA][ | S-3 | A][mG][mG][mA][mG][mA][mG][mU][mC][ |
| | mU][mC][mA][mG][mU][mC][mC][dT]*[dT] | | mA][mU][mU][mG][mC][mA][mA][mA][dT |
| | (SEQ ID NO: 450) | | ]*[dT] (SEQ ID NO: 824) |
| OSL245 | [mU][mU][mU][mG][mC][mA][mA][mU][mG][ | OSL245 | [mG][mG][mA][mC][mU][mG][mA][mU][m |
| A-4 | mA][mC][mU][mC][mU][mC][mC][mU][mA][ | S-4 | A][mG][mG][mA][mG][mA][mG][mU][mC][ |
| | mU][mC][mA][mG][mU][mC][mC][dT]*[dT] | | mA][mU][mU][mG][mC][mA][mA][mA](SE |
| | (SEQ ID NO: 451) | | Q ID NO: 825) |
| OSL245 | [mU][mU][mU][mG][mC][mA][mA][mU][mG][ | OSL245 | [mG][mG][mA][mC][mU][mG][mA][mU][m |
| A-5 | mA][mC][mU][mC][mU][mC][mC][mU][mA][ | S-5 | A][mG][mG][mA][mG][mA][mG][mU][mC][ |
| | mU][mC][mA][mG][mU][mC][mC] (SEQ ID | | mA][mU][mU][mG][mC][mA][mA][mA][dT] |
| | NO: 452) | | *[dT](SEQ ID NO: 826) |
| OSL245 | [mU][mU][mU][mG][mC][mA][mA][mU][mG][ | OSL245 | [mG][mG][mA][mC][mU][mG][mA][mU][m |
| A-6 | mA][mC][mU][mC][mU][mC][mC][mU][mA][ | S-6 | A][mG][mG][mA][mG][mA][mG][mU][mC][ |
| | mU][mC][mA][mG][mU][mC][mC] (SEQ ID | | mA][mU][mU][mG][mC][mA][mA][mA] |
| | NO: 453) | | (SEQ ID NO: 827) |
| OSL245 | [mU][mU][mU][mG][mC][mA][mA][mU][mG][ | OSL245 | GGACUGAUAGGAGAGUCAUUGCAAA[dT]* |
| A-7 | mA][mC][mU][mC][mU][mC][mC][mU][mA][ | S-7 | [dT] (SEQ ID NO: 828) |
| | mU][mC][mA][mG][mU][mC][mC][dT]*[dT] | | |
| | (SEQ ID NO: 454) | | |
| OSL245 | [mU][2fU][mU][2fG][mC][2fA][mA][2fU] | OSL245 | [2fG][mG][2fA][mC][2fU][mG][2fA][mU] |
| A-8 | [mG][2fA][mC][2fU][mC][2fU][mC][2fC] | S-8 | [2fA][mG][2fG][mA][2fG][mA][2fG][mU] |
| | [mU][2fA][mU][2fC][mA][2fG][mU][2fC] | | [2fC][mA][2fU][mU][2fG][mC][2fA][mA] |
| | [mC][dT]*[dT] (SEQ ID NO: 455) | | [2fA][dT]*[dT] (SEQ ID NO: 829) |
| OSL245 | [mU][2fU][mU][2fG][mC][2fA][mA][2fU] | OSL245 | [2fG][mG][2fA][mC][2fU][mG][2fA][mU] |
| A-9 | [mG][2fA][mC][2fU][mC][2fU][mC][2fC] | S-9 | [2fA][mG][2fG][mA][2fG][mA][2fG][mU] |
| | [mU][2fA][mU][2fC][mA][2fG][mU][2fC] | | [2fC][mA][2fU][mU][2fG][mC][2fA][mA] |
| | [mC] (SEQ ID NO: 456) | | [2fA][dT]*[dT] (SEQ ID NO: 830) |
| OSL245 | [mU][2fU][mU][2fG][mC][2fA][mA][2fU] | OSL245 | [2fG][mG][2fA][mC][2fU][mG][2fA][mU] |
| A-10 | [mG][2fA][mC][2fU][mC][2fU][mC][2fC] | S-10 | [2fA][mG][2fG][mA][2fG][mA][2fG][mU] |
| | [mU][2fA][mU][2fC][mA][2fG][mU][2fC] | | [2fC][mA][2fU][mU][2fG][mC][2fA][mA] |
| | [mC][dT]*[dT ](SEQ ID NO: 457) | | [2fA] (SEQ ID NO: 831) |
| OSL245 | [mU][2fU][mU][2fG][mC][2fA][mA][2fU] | OSL245 | [2fG][mG][2fA][mC][2fU][mG][2fA][mU] |
| A-11 | [mG][2fA][mC][2fU][mC][2fU][mC][2fC] | S-11 | [2fA][mG][2fG][mA][2fG][mA][2fG][mU] |
| | [mU][2fA][mU][2fC][mA][2fC][mU][2fC] | | [2fC][mA][2fU][mU][2fG][mC][2fA][mA] |
| | [mC] (SEQ ID NO: 458) | | [2fA] (SEQ ID NO: 832) |
| OSL245 | [2fU][mU][2fU][mG][2fC][mA][2fA][mU] | OSL245 | [mG][2fG][mA][2fC][mU][2fG][mA][2fU] |
| A-12 | [2fG][mA][2fC][mU][2fC][mU][2fC][mC] | S-12 | [mA][2fG][mG][2fA][mG][2fA][mG][2fU] |
| | [2fU][mA][2fU][mC][2fA][mG][2fU][mC] | | [mC][2fA][mU][2fU][mG][2fC][mA][2fA] |
| | [2fC][dT]*[dT] (SEQ ID NO: 459) | | [mA][dT]*[dT] (SEQ ID NO: 833) |
| OSL245 | [mU][2fA][mU][2fC][mC][2fU][mA][2fA] | OSL245 | [2fG][mG][2fA][mC][2fU][mG][2fA][mU] |
| A-13 | [mG][2fU][mC][2fA][mC][2fA][mC][2fG] | S-13 | [2fA][mG][2fG][mA][2fG][mA][2fG][mU] |
| | [mU][2fU][mU][2fG][mA][2fC][mU][2fG] | | [2fC][mA][2fU][mU][2fG][mC][2fA][mA] |
| | [mC] (SEQ ID NO: 460) | | [2fA] (SEQ ID NO: 834) |
| OSL245 | [mU][2fU][2fU][2fG][2fC][2fA][2fA][2fU] | OSL245 | [2fU][mG][2fA][mU][2fA][mG][2fG][mA] |
| A-14 | [2fG][2fA][2fC][2fU][2fC][2fU][2fC] | S-14 | [2fG][mA][2fG][mU][2fC][mA][2fU][mU] |
| | [2fC][2fU][2fA][2fU][2fC][2fA][2fG] | | [2fG][mC][2fA][mA][2fA][dT]*[dT] |
| | [2fU][2fC][2fC][dT]*[dT] (SEQ ID NO: | | (SEQ ID NO: 835) |
| | 461) | | |
| OSL245 | [mU][2fU][2fU][2fG][2fC][2fA][2fA][2fU] | OSL245 | [2fG][mA][2fG][mA][2fG][mU][2fC][mA] |
| A-15 | [2fG][2fA][2fC][2fU][2fC][2fU][2fC] | S-15 | [2fU][mU][2fG][mC][2fA][mA][2fA][dT] |
| | [2fC][2fU][2fA][2fU][2fC][2fA][2fG] | | *[dT] (SEQ ID NO: 836) |
| | [2fU][2fC][2fC][dT]*[dT] (SEQ ID | | |
| | NO: 462) | | |
| OSL245 | [mU][2fU][mU][2fG][mC][2fA][mA][2fU] | OSL245 | [2fG][mA][2fG][mA][2fG][mU][2fC][mA] |
| A-16 | [mG][2fA][mC][2fU][mC][2fU][mC][2fC] | S-16 | [2fU][mU][2fG][mC][2fA][mA][2fA][dT] |
| | [mU][2fA][mU][2fC][mA][2fG][mU][2fC] | | *[dT] (SEQ ID NO: 837) |
| | [mC][dT]*[dT] (SEQ ID NO: 463) | | |
| OSL245 | [mU][2fU][mU][2fG][mC][2fA][mA][2fU] | OSL245 | [2fG][mA][2fG][mA][2fG][mU][2fC][mA] |
| A-17 | [mG][2fA][mC][2fU][mC][2fU][mC][2fC] | S-17 | [2fU][mU][2fG][mC][2fA][mA][2fA] |
| | [mU][2fA][mU][2fC][mA][2fG][mU] (SEQ | | (SEQ ID NO: 838) |
| | ID NO: 464) | | |
| OSL245 | [mU][2fU][mU][2fG][mC][2fA][mA][2fU] | OSL245 | ACCAGUUAUACUGGAUAUCUA[dT][dT] |
| A-18 | [mG][2fA][mC][2fU][mC][2fU][mC][2fC] | S-18 | (SEQ ID NO: 840) |
| | [2fU][2fA][2fU][2fC][2fA][2fG][2fU] | | |
| | (SEQ ID NO: 465) | | |
| OSL246 | UAGAUAUCCAGUAUAACUGGU[dT][dT] (SEQ | OSL246 | GGGAGAAGUAUGGAAACAAAA[dT][dT] |
| A | ID NO: 466) | S | (SEQ ID NO: 841) |
| OSL247 | UUUUGUUUCCAUACUUCUCCC[dT][dT] (SEQ | OSL247 | AAGUAUGGAAACAAAAUAAAU[dT][dT] |
| A | ID NO: 467) | S | (SEQ ID NO: 842) |
| OSL248 | AUUUAUUUUGUUUCCAUACUU[dT][dT] (SEQ | OSL248 | UUCAUCAACUCAGAUACAAUA[dT][dT] |
| A | ID NO: 468) | S | (SEQ ID NO: 843) |
| OSL249 | UAUUGUAUCUGAGUUGAUGAA[dT][dT] (SEQ | OSL249 | CGGAGGAAAUUGCUAUUUUGA[dT][dT] |
| A | ID NO: 469) | S | (SEQ ID NO: 844) |
| OSL250 | UCAAAAUAGCAAUUUCCUCCG[dT][dT] (SEQ | OSL250 | AGGAAAUUGCUAUUUUGAUGA[dT][dT] |
| A | ID NO: 470) | S | (SEQ ID NO: 845) |
| OSL251 | UCAUCAAAAUAGCAAUUUCCU[dT][dT] (SEQ | OSL251 | CACCGGAAAAUAUUGUGAAAU[dT][dT] |
| A | ID NO: 471) | S | (SEQ ID NO: 846) |
| OSL252 | AUUUCACAAUAUUUUCCGGUG[dT][dT] (SEQ | OSL252 | UUGUGAAAUGGCGUUUUCAAA[dT][dT] |
| A | ID NO: 472) | S | (SEQ ID NO: 847) |
| OSL253 | UUUGAAAACGCCAUUUCACAA[dT][dT] (SEQ | OSL253 | CAGGAUUCUUCCACUAUAGAA[dT][dT] |
| A | ID NO: 473) | S | (SEQ ID NO: 848) |
| OSL254 | UUCUAUAGUGGAAGAAUCCUG[dT][dT] (SEQ | OSL254 | GGCAGAUCUUAACAUGGAUAU[dT][dT] |
| A | ID NO: 474) | S | (SEQ ID NO: 849) |
| OSL255 | AUAUCCAUGUUAAGAUCUGCC[dT][dT] (SEQ | OSL255 | GGCAAUGAGUGAAGACUUUGU[dT][dT] |
| A | ID NO: 475) | S | (SEQ ID NO: 850) |
| OSL256 | ACAAAGUCUUCACUCAUUGCC[dT][dT] (SEQ | OSL256 | AUCUGAAAAUGUGGAUAAUAA[dT][dT] |
| A | ID NO: 476) | S | (SEQ ID NO: 851) |
| OSL257 | UUAUUAUCCACAUUUUCAGAU[dT][dT] (SEQ | OSL257 | ACCAGUUAUACUGGAUAUCUA[dT][dT] |
| A | ID NO: 477) | S | (SEQ ID NO: 840) |
| OSL258 | UCUUAUUAUCCACAUUUUCAG[dT][dT] (SEQ | OSL258 | CUGAAAAUGUGGAUAAUAAGA[dT][dT] |
| A | ID NO: 478) | S | (SEQ ID NO: 852) |
| OSL259 | UCCAUAAUUCUUAUUAUCCAC[dT][dT] (SEQ | OSL259 | GUGGAUAAUAAGAAUUAUGGA[dT][dT] |
| A | ID NO: 479) | S | (SEQ ID NO: 853) |
| OSL260 | UUCCAUAAUUCUUAUUAUCCA[dT][dT] (SEQ | OSL260 | UGGAUAAUAAGAAUUAUGGAA[dT][dT] |
| A | ID NO: 480) | S | (SEQ ID NO: 854) |
| OSL261 | UUUUCGUUUGAAGAGAUUCCA[dT][dT] (SEQ | OSL261 | UGGAAUCUCUUCAAACGAAAA[dT][dT] |
| A | ID NO: 481) | S | (SEQ ID NO: 855) |
| OSL262 | UAGAUUUUCGUUUGAAGAGAU[dT][dT] (SEQ | OSL262 | AUCUCUUCAAACGAAAAUCUA[dT][dT] |
| A | ID NO: 482) | S | (SEQ ID NO: 856) |
| OSL263 | UUUAGAUUUUCGUUUGAAGAG[dT][dT] (SEQ | OSL263 | CUCUUCAAACGAAAAUCUAAA[dT][dT] |
| A | ID NO: 483) | S | (SEQ ID NO: 857) |
| OSL264 | UUGUUUAGAUUUUCGUUUGAA[dT][dT] (SEQ | OSL264 | UUCAAACGAAAAUCUAAACAA[dT][dT] |
| A | ID NO: 484) | S | (SEQ ID NO: 858) |
| OSL265 | UAGUUUGUUUAGAUUUUCGUU[dT][dT] | OSL265 | AACGAAAAUCUAAACAAACUA[dT][dT] |
| A | (SEQ ID NO: 485) | S | (SEQ ID NO: 859) |
| OSL266 | UUUCAAAGUUGGUAGUUUGUU[dT][dT] (SEQ | OSL266 | AACAAACUACCAACUUUGAAA[dT][dT] |
| A | ID NO: 486) | S | (SEQ ID NO: 860) |
| OSL267 | AUUGGAUUUUCAAAGUUGGUA[dT][dT] (SEQ | OSL267 | UACCAACUUUGAAAAUCCAAU[dT][dT] |
| A | ID NO: 487) | S | (SEQ ID NO: 861) |
| OSL268 | AUAGAUUGGAUUUUCAAAGUU[dT][dT] (SEQ | OSL268 | AACUUUGAAAAUCCAAUCUAU[dT][dT] |
| A | ID NO: 488) | S | (SEQ ID NO: 862) |
| OSL269 | UUAAAAGUGUCUUCUGUUGCA[dT][dT] (SEQ | OSL269 | UGCAACAGAAGACACUUUUAA[dT][dT] |
| A | ID NO: 489) | S | (SEQ ID NO: 863) |
| OSL270 | UCUUUAACAAGAUUUGCGGUG[dT][dT] (SEQ | OSL270 | CACCGCAAAUCUUGUUAAAGA[dT][dT] |
| A | ID NO: 490) | S | (SEQ ID NO: 864) |
| OSL271 | UCUUCUUUAACAAGAUUUGCG[dT][dT] (SEQ | OSL271 | CGCAAAUCUUGUUAAAGAAGA[dT][dT] |
| A | ID NO: 491) | S | (SEQ ID NO: 865) |
| OSL272 | UGGUAUAGCUAUACUUCAGAG[dT][dT] (SEQ | OSL272 | CUCUGAAGUAUAGCUAUACCA[dT][dT] |
| A | ID NO: 492) | S | (SEQ ID NO: 866) |
| OSL273 | AUUAUUCCCUAAAUAGCUGGU[dT][dT] (SEQ | OSL273 | ACCAGCUAUUUAGGGAAUAAU[dT][dT] |
| A | ID NO: 493) | S | (SEQ ID NO: 867) |
| OSL274 | UAAUUAUUCCCUAAAUAGCUG[dT][dT] (SEQ | OSL274 | CAGCUAUUUAGGGAAUAAUUA[dT][dT] |
| A | ID NO: 494) | S | (SEQ ID NO: 868) |
| OSL275 | AUAUAUGUGCAAAAGUGUGUU[dT][dT] (SEQ | OSL275 | AACACACUUUUGCACAUAUAU[dT][dT] |
| A | ID NO: 495) | S | (SEQ ID NO: 869) |
| OSL276 | AAAUAUAUGUGCAAAAGUGUG[dT][dT] (SEQ | OSL276 | CACACUUUUGCACAUAUAUUU[dT][dT] |
| A | ID NO: 496) | S | (SEQ ID NO: 870) |
| OSL277 | AACUUUUUUCAUCUGUUUGUA[dT][dT] (SEQ | OSL277 | UACAAACAGAUGAAAAAAGUU[dT][dT] |
| A | ID NO: 497) | S | (SEQ ID NO: 871) |
| OSL278 | UAAAGUACUGAAUGUUAACUU[dT][dT] (SEQ | OSL278 | AAGUUAACAUUCAGUACUUUA[dT][dT] |
| A | ID NO: 498) | S | (SEQ ID NO: 872) |
| OSL279 | UUUUUUUCAUAAAGUACUGAA[dT][dT] (SEQ | OSL279 | UUCAGUACUUUAUGAAAAAAA[dT][dT] |
| A | ID NO: 499) | S | (SEQ ID NO: 873) |
| OSL280 | UAUUUUUUUCAUAAAGUACUG[dT][dT] (SEQ | OSL280 | CAGUACUUUAUGAAAAAAAUA[dT][dT] |
| A | ID NO: 500) | S | (SEQ ID NO: 874) |
| OSL281 | AUUUGUAAAAAUAUGAGACGG[dT][dT] (SEQ | OSL281 | CCGUCUCAUAUUUUUACAAAU[dT][dT] |
| A | ID NO: 501) | S | (SEQ ID NO: 875) |
| OSL282 | ACAUUGUGAUAAUUAUUUGUA[dT][dT] (SEQ | OSL282 | UACAAAUAAUUAUCACAAUGU[dT][dT] |
| A | ID NO: 502) | S | (SEQ ID NO: 876) |
| OSL283 | AUACAUAUAGUACAUUGUGAU[dT][dT] (SEQ | OSL283 | AUCACAAUGUACUAUAUGUAU[dT][dT] |
| A | ID NO: 503) | S | (SEQ ID NO: 877) |
| OSL284 | AUAUACAUAUAGUACAUUGUG[dT][dT] (SEQ | OSL284 | CACAAUGUACUAUAUGUAUAU[dT][dT] |
| A | ID NO: 504) | S | (SEQ ID NO: 878) |
| OSL285 | AAAGAUAUACAUAUAGUACAU[dT][dT] (SEQ | OSL285 | AUGUACUAUAUGUAUAUCUUU[dT][dT] |
| A | ID NO: 505) | S | (SEQ ID NO: 879) |
| OSL286 | AUUACCUUCAGACAACUUCAG[dT][dT] (SEQ | OSL286 | CUGAAGUUGUCUGAAGGUAAU[dT][dT] |
| A | ID NO: 506) | S | (SEQ ID NO: 880) |
| OSL287 | UAUUUAUAGUAUUACCUUCAG[dT][dT] (SEQ | OSL287 | CUGAAGGUAAUACUAUAAAUA[dT][dT] |
| A | ID NO: 507) | S | (SEQ ID NO: 881) |
| OSL288 | UAAUCUUUCCAAAAUUUACAA[dT][dT] (SEQ | OSL288 | UUGUAAAUUUUGGAAAGAUUA[dT][dT] |
| A | ID NO: 508) | S | (SEQ ID NO: 882) |
| OSL289 | AGUAACAGGAUAAUCUUUCCA[dT][dT] (SEQ | OSL289 | UGGAAAGAUUAUCCUGUUACU[dT][dT] |
| A | ID NO: 509) | S | (SEQ ID NO: 883) |
| OSL290 | AUUCAGUAACAGGAUAAUCUU[dT][dT] (SEQ | OSL290 | AAGAUUAUCCUGUUACUGAAU[dT][dT] |
| A | ID NO: 510) | S | (SEQ ID NO: 884) |
| OSL291 | UAGCAAAUUCAGUAACAGGAU[dT][dT] (SEQ | OSL291 | AUCCUGUUACUGAAUUUGCUA[dT][dT] |
| A | ID NO: 511) | S | (SEQ ID NO: 885) |
| OSL292 | UUAGCAAAUUCAGUAACAGGA[dT][dT] (SEQ | OSL292 | UCCUGUUACUGAAUUUGCUAA[dT][dT] |
| A | ID NO: 512) | S | (SEQ ID NO: 886) |
| OSL293 | UCUUUAUUAGCAAAUUCAGUA[dT][dT] (SEQ | OSL293 | UACUGAAUUUGCUAAUAAAGA[dT][dT] |
| A | ID NO: 513) | S | (SEQ ID NO: 887) |
| OSL294 | AUCAUUUACUAUAAUGAUCAC[dT][dT] (SEQ | OSL294 | GUGAUCAUUAUAGUAAAUGAU[dT][dT] |
| A | ID NO: 514) | S | (SEQ ID NO: 888) |
| OSL295 | UUCUUGUUGGAUCAUUUACUA[dT][dT] (SEQ | OSL295 | UAGUAAAUGAUCCAACAAGAA[dT][dT] |
| A | ID NO: 515) | S | (SEQ ID NO: 889) |
| OSL296 | UCAAUUCCUUUUCUUGUUGGA[dT][dT] (SEQ | OSL296 | UCCAACAAGAAAAGGAAUUGA[dT][dT] |
| A | ID NO: 516) | S | (SEQ ID NO: 890) |
| OSL297 | AUUUUAUAGGAAAUAUGAGUG[dT][dT] (SEQ | OSL297 | CACUCAUAUUUCCUAUAAAAU[dT][dT] |
| A | ID NO: 517) | S | (SEQ ID NO: 891) |
| OSL298 | UAAUUUUAUAGGAAAUAUGAG[dT][dT] (SEQ | OSL298 | CUCAUAUUUCCUAUAAAAUUA[dT][dT] |
| A | ID NO: 518) | S | (SEQ ID NO: 892) |
| OSL299 | UGCUAAUGUGUAAAAAUGGAC[dT][dT] (SEQ | OSL299 | GUCCAUUUUUACACAUUAGCA[dT][dT] |
| A | ID NO: 519) | S | (SEQ ID NO: 893) |
| OSL300 | UUGAACAUUAAUUAAGUGCUA[dT][dT] (SEQ | OSL300 | UAGCACUUAAUUAAUGUUCAA[dT][dT] |
| A | ID NO: 520) | S | (SEQ ID NO: 894) |
| OSL301 | AUUGAACAUUAAUUAAGUGCU[dT][dT] (SEQ | OSL301 | AGCACUUAAUUAAUGUUCAAU[dT][dT] |
| A | ID NO: 521) | S | (SEQ ID NO: 895) |
| OSL302 | AUAUUGAACAUUAAUUAAGUG[dT][dT] (SEQ | OSL302 | CACUUAAUUAAUGUUCAAUAU[dT][dT] |
| A | ID NO: 522) | S | (SEQ ID NO: 896) |
| OSL303 | AAAUUGACAUGUAAUAUUGAA[dT][dT] (SEQ | OSL303 | UUCAAUAUUACAUGUCAAUUU[dT][dT] |
| A | ID NO: 523) | S | (SEQ ID NO: 897) |
| OSL304 | AUCAACAUAGCCAUUAAUCAA[dT][dT] (SEQ | OSL304 | UUGAUUAAUGGCUAUGUUGAU[dT][dT] |
| A | ID NO: 524) | S | (SEQ ID NO: 898) |
| OSL305 | UCUAUACAACACAUAGUGGCC[dT][dT] (SEQ | OSL305 | GGCCACUAUGUGUUGUAUAGA[dT][dT] |
| A | ID NO: 525) | S | (SEQ ID NO: 899) |
| OSL306 | AUGUCUAUACAACACAUAGUG[dT][dT] (SEQ | OSL306 | CACUAUGUGUUGUAUAGACAU[dT][dT] |
| A | ID NO: 526) | S | (SEQ ID NO: 900) |
| OSL307 | ACUGAAUUGCUUUUCCUACCU[dT][dT] (SEQ | OSL307 | AGGUAGGAAAAGCAAUUCAGU[dT][dT] |
| A | ID NO: 527) | S | (SEQ ID NO: 901) |
| OSL308 | AAAUAAAAAUGUUGUCUUGGC[dT][dT] (SEQ | OSL308 | GCCAAGACAACAUUUUUAUUU[dT][dT] |
| A | ID NO: 528) | S | (SEQ ID NO: 902) |
| OSL309 | AUCACAAAUAAAAAUGUUGUC[dT][dT] (SEQ | OSL309 | GACAACAUUUUUAUUUGUGAU[dT][dT] |
| A | ID NO: 529) | S | (SEQ ID NO: 903) |
| OSL310 | AAUGAUAUGGGAUUUCCUCAU[dT][dT] (SEQ | OSL310 | AUGAGGAAAUCCCAUAUCAUU[dT][dT] |
| A | ID NO: 530) | S | (SEQ ID NO: 904) |
| OSL311 | AUUAACCACAAACUCAAUGCA[dT][dT] (SEQ | OSL311 | UGCAUUGAGUUUGUGGUUAAU[dT][dT] |
| A | ID NO: 531) | S | (SEQ ID NO: 905) |
| OSL312 | UUUAAUUAACCACAAACUCAA[dT][dT] (SEQ | OSL312 | UUGAGUUUGUGGUUAAUUAAA[dT][dT] |
| A | ID NO: 532) | S | (SEQ ID NO: 906) |
| OSL313 | UUUGGUUUCAGAAAUUCAGCU[dT][dT] (SEQ | OSL313 | AGCUGAAUUUCUGAAACCAAA[dT][dT] |
| A | ID NO: 533) | S | (SEQ ID NO: 907) |
| OSL314 | UUAUGAAGACACAGAUUUGGU[dT][dT] (SEQ | OSL314 | ACCAAAUCUGUGUCUUCAUAA[dT][dT] |
| A | ID NO: 534) | S | (SEQ ID NO: 908) |
| OSL315 | UUUCAUAGAAACAAAAACCCA[dT][dT] (SEQ | OSL315 | UGGGUUUUUGUUUCUAUGAAA[dT][dT] |
| A | ID NO: 535) | S | (SEQ ID NO: 909) |
| OSL316 | AUGAUAUUUUCAUAGAAACAA[dT][dT] (SEQ | OSL316 | UUGUUUCUAUGAAAAUAUCAU[dT][dT] |
| A | ID NO: 536) | S | (SEQ ID NO: 910) |
| OSL317 | UAUAAUGAUAUUUUCAUAGAA[dT][dT] (SEQ | OSL317 | UUCUAUGAAAAUAUCAUUAUA[dT][dT] |
| A | ID NO: 537) | S | (SEQ ID NO: 911) |
| OSL318 | UGAUUAUAAUGAUAUUUUCAU[dT][dT] (SEQ | OSL318 | AUGAAAAUAUCAUUAUAAUCA[dT][dT] |
| A | ID NO: 538) | S | (SEQ ID NO: 912) |
| OSL319 | AUAAAUAGUGAUUAUAAUGAU[dT][dT] (SEQ | OSL319 | AUCAUUAUAAUCACUAUUUAU[dT][dT] |
| A | ID NO: 539) | S | (SEQ ID NO: 913) |
| OSL320 | AAAAGCUUAAUAAGAAUGGUU[dT][dT] (SEQ | OSL320 | AACCAUUCUUAUUAAGCUUUU[dT][dT] |
| A | ID NO: 540) | S | (SEQ ID NO: 914) |
| OSL321 | AAAAAGCUUAAUAAGAAUGGU[dT][dT] (SEQ | OSL321 | ACCAUUCUUAUUAAGCUUUUU[dT][dT] |
| A | ID NO: 541) | S | (SEQ ID NO: 915) |
| OSL322 | UAAAUGUACACAUUUAGCCAC[dT][dT] (SEQ | OSL322 | GUGGCUAAAUGUGUACAUUUA[dT][dT] |
| A | ID NO: 542) | S | (SEQ ID NO: 916) |
| OSL323 | AUAAAUGUACACAUUUAGCCA[dT][dT] (SEQ | OSL323 | UGGCUAAAUGUGUACAUUUAU[dT][dT] |
| A | ID NO: 543) | S | (SEQ ID NO: 917) |
| OSL324 | UAUAAAUGUACACAUUUAGCC[dT][dT] (SEQ | OSL324 | GGCUAAAUGUGUACAUUUAUA[dT][dT] |
| A | ID NO: 544) | S | (SEQ ID NO: 918) |
| OSL325 | UUCUAAUAUAAAUGUACACAU[dT][dT] (SEQ | OSL325 | AUGUGUACAUUUAUAUUAGAA[dT][dT] |
| A | ID NO: 545) | S | (SEQ ID NO: 919) |
| OSL326 | AAGAAUUAAAGAAAAGAUCUG[dT][dT] (SEQ | OSL326 | CAGAUCUUUUCUUUAAUUCUU[dT][dT] |
| A | ID NO: 546) | S | (SEQ ID NO: 920) |
| OSL327 | AAUAAGAAUUAAAGAAAAGAU[dT][dT] (SEQ | OSL327 | AUCUUUUCUUUAAUUCUUAUU[dT][dT] |
| A | ID NO: 547) | S | (SEQ ID NO: 921) |
| OSL328 | AAACCAAUAAGAAUUAAAGAA[dT][dT] (SEQ | OSL328 | UUCUUUAAUUCUUAUUGGUUU[dT][dT] |
| A | ID NO: 548) | S | (SEQ ID NO: 922) |
| OSL329 | ACUAUACCCACUAUUUAAGAG[dT][dT] (SEQ | OSL329 | CUCUUAAAUAGUGGGUAUAGU[dT][dT] |
| A | ID NO: 549) | S | (SEQ ID NO: 923) |
| OSL330 | ACAAAUGUGCAAUAUUAGCAC[dT][dT] (SEQ | OSL330 | GUGCUAAUAUUGCACAUUUGU[dT][dT] |
| A | ID NO: 550) | S | (SEQ ID NO: 924) |
| OSL331 | AACAAAUGUGCAAUAUUAGCA[dT][dT] (SEQ | OSL331 | UGCUAAUAUUGCACAUUUGUU[dT][dT] |
| A | ID NO: 551) | S | (SEQ ID NO: 925) |
| OSL332 | AUGUUUCAUUCAUUCAUCCAU[dT][dT] (SEQ | OSL332 | AUGGAUGAAUGAAUGAAACAU[dT][dT] |
| A | ID NO: 552) | S | (SEQ ID NO: 926) |
| OSL333 | AGUAGUAUAUGUUUCAUUCAU[dT][dT] (SEQ | OSL333 | AUGAAUGAAACAUAUACUACU[dT][dT] |
| A | ID NO: 553) | S | (SEQ ID NO: 927) |
| OSL334 | AAUCAGUAGUAUAUGUUUCAU[dT][dT] (SEQ | OSL334 | AUGAAACAUAUACUACUGAUU[dT][dT] |
| A | ID NO: 554) | S | (SEQ ID NO: 928) |
| OSL335 | AAAUAAUCAGUAGUAUAUGUU[dT][dT] (SEQ | OSL335 | AACAUAUACUACUGAUUAUUU[dT][dT] |
| A | ID NO: 555) | S | (SEQ ID NO: 929) |
| OSL336 | AAUCAAAGUAAUUACAGUCAG[dT][dT] (SEQ | OSL336 | CUGACUGUAAUUACUUUGAUU[dT][dT] |
| A | ID NO: 556) | S | (SEQ ID NO: 930) |
| OSL337 | AUCUAAUCAAAGUAAUUACAG[dT][dT] (SEQ | OSL337 | CUGUAAUUACUUUGAUUAGAU[dT][dT] |
| A | ID NO: 557) | S | (SEQ ID NO: 931) |
| OSL338 | UUAUUUCCAGUUGUUUAUCUA[dT][dT] (SEQ | OSL338 | UAGAUAAACAACUGGAAAUAA[dT][dT] |
| A | ID NO: 558) | S | (SEQ ID NO: 932) |
| OSL339 | UUAUUAGAACUUUUUCAGCAG[dT][dT] (SEQ | OSL339 | CUGCUGAAAAAGUUCUAAUAA[dT][dT] |
| A | ID NO: 559) | S | (SEQ ID NO: 933) |
| OSL340 | UUUAUUAGAACUUUUUCAGCA[dT][dT] (SEQ | OSL340 | UGCUGAAAAAGUUCUAAUAAA[dT][dT] |
| A | ID NO: 560) | S | (SEQ ID NO: 934) |

TABLE 5A
CD320 ANTISENSE TARGET

| | | | | | | SEQ |
|---|---|---|---|---|---|---|
| | target | start | | | | ID |
| ID | position | position | target sequence | Location | Size | NO: |
| OSC1 | 2-24 | 2 | TGCGCGTGCGCAGGGATAAGAGA | 5′ UTR | 21 | 996 |
| OSC2 | 4-26 | 4 | CGCGTGCGCAGGGATAAGAGAGC | 5′ UTR | 21 | 997 |
| OSC3 | 48-70 | 48 | GCGCCGCTGTGGGGACAGCATGA | 5′ UTR | 21 | 998 |
| OSC4 | 63-85 | 63 | CAGCATGAGCGGCGGTTGGATGG | 5′UTR- | 21 | 999 |
| | | | | CDS | | |
| OSC5 | 164-186 | 164 | CCGCCGCGAGCCCGCTTTCCACC | CDS | 21 | 1000 |
| OSC6 | 222-244 | 222 | CTCGTGCCCACCCACCAAGTTCC | CDS | 21 | 1001 |
| OSC7 | 225-247 | 225 | GTGCCCACCCACCAAGTTCCAGT | CDS | 21 | 1002 |
| OSC8 | 227-249 | 227 | GCCCACCCACCAAGTTCCAGTGC | CDS | 21 | 1003 |
| OSC9 | 244-266 | 244 | CAGTGCCGCACCAGTGGCTTATG | CDS | 21 | 1004 |
| OSC10 | 249-271 | 249 | CCGCACCAGTGGCTTATGCGTGC | CDS | 21 | 1005 |
| OSC11 | 282-304 | 282 | GCGCTGCGACAGGGACTTGGACT | CDS | 21 | 1006 |
| OSC12 | 306-328 | 306 | CAGCGATGGCAGCGATGAGGAGG | CDS | 21 | 1007 |
| OSC13 | 390-412 | 390 | CCCCTGCACCGGCGTCAGTGACT | CDS | 21 | 1008 |
| OSC14 | 411-433 | 411 | CTGCTCTGGGGGAACTGACAAGA | CDS | 21 | 1009 |
| OSC15 | 414-436 | 414 | CTCTGGGGGAACTGACAAGAAAC | CDS | 21 | 1010 |
| OSC16 | 417-439 | 417 | TGGGGGAACTGACAAGAAACTGC | CDS | 21 | 1011 |
| OSC17 | 422-466 | 422 | GAACTGACAAGAAACTGCGCAACTG | CDS | 25 | 1012 |
| OSC18 | 483-505 | 483 | CACGCTGAGCGATGACTGCATTC | CDS | 21 | 1013 |
| OSC19 | 484-506 | 484 | ACGCTGAGCGATGACTGCATTCC | CDS | 21 | 1014 |
| OSC20 | 487-509 | 487 | CTGAGCGATGACTGCATTCCACT | CDS | 21 | 1015 |
| OSC21 | 489-511 | 489 | GAGCGATGACTGCATTCCACTCA | CDS | 21 | 1016 |
| OSC22 | 520-542 | 520 | TGCGACGGCCACCCAGACTGTCC | CDS | 21 | 1017 |
| OSC23 | 556-578 | 556 | GAGCTCGGCTGTGGAACCAATGA | CDS | 21 | 1018 |
| OSC24 | 560-582 | 560 | TCGGCTGTGGAACCAATGAGATC | CDS | 21 | 1019 |
| OSC25 | 561-583 | 561 | CGGCTGTGGAACCAATGAGATCC | CDS | 21 | 1020 |
| OSC26 | 564-586 | 564 | CTGTGGAACCAATGAGATCCTCC | CDS | 21 | 1021 |
| OSC27 | 626-648 | 626 | TGGAGAGTGTCACCTCTCTCAGG | CDS | 21 | 1022 |
| OSC28 | 641-663 | 641 | CTCTCAGGAATGCCACAACCATG | CDS | 21 | 1023 |
| OSC29 | 689-711 | 689 | TCCCCTCTGTCGGGAATGCCACA | CDS | 21 | 1024 |
| OSC30 | 695-717 | 695 | CTGTCGGGAATGCCACATCCTCC | CDS | 21 | 1025 |
| OSC31 | 719-741 | 719 | CTGCCGGAGACCAGTCTGGAAGC | CDS | 21 | 1026 |
| OSC32 | 741-763 | 741 | CCCAACTGCCTATGGGGTTATTG | CDS | 21 | 1027 |
| OSC33 | 767-789 | 767 | CTGCTGCGGTGCTCAGTGCAAGC | CDS | 21 | 1028 |
| OSC34 | 795-817 | 795 | CACCGCCACCCTCCTCCTTTTGT | CDS | 21 | 1029 |
| OSC35 | 797-819 | 797 | CCGCCACCCTCCTCCTTTTGTCC | CDS | 21 | 1030 |
| OSC36 | 843-865 | 843 | CCGCCCACTGGGGTTACTGGTGG | CDS | 21 | 1031 |
| OSC37 | 852-874 | 852 | GGGGTTACTGGTGGCCATGAAGG | CDS | 21 | 1032 |
| OSC38 | 857-879 | 857 | TACTGGTGGCCATGAAGGAGTCC | CDS | 21 | 1033 |
| OSC39 | 874-896 | 874 | GAGTCCCTGCTGCTGTCAGAACA | CDS | 21 | 1034 |
| OSC40 | 878-900 | 878 | CCCTGCTGCTGTCAGAACAGAAG | CDS | 21 | 1035 |
| OSC41 | 881-903 | 881 | TGCTGCTGTCAGAACAGAAGACC | CDS | 21 | 1036 |
| OSC42 | 884-906 | 884 | TGCTGTCAGAACAGAAGACCTCG | CDS | 21 | 1037 |
| OSC43 | 901-923 | 901 | ACCTCGCTGCCCTGAGGACAAGC | CDS | 21 | 1038 |
| OSC44 | 907-929 | 907 | CTGCCCTGAGGACAAGCACTTGC | CDS- | 21 | 1039 |
| | | | | 3′UTR | | |
| OSC45 | 971-993 | 971 | GAGCAGTGATGCGGATGGGTACC | 3′ UTR | 21 | 1040 |
| OSC46 | 995-1017 | 995 | GGGCACACCAGCCCTCAGAGACC | 3′ UTR | 21 | 1041 |
| OSC47 | 1006-1026 | 1006 | CCCTCAGAGACCTGAGCTCTT | 3′ UTR | 21 | 1393 |
| OSC48 | 1006-1028 | 1006 | CCCTCAGAGACCTGAGCTCTTCT | 3′ UTR | 21 | 1042 |
| OSC49 | 1008-1030 | 1008 | CTCAGAGACCTGAGCTCTTCTGG | 3′ UTR | 21 | 1043 |
| OSC50 | 1082-1104 | 1082 | GGGTCCCTGGACACTCCCTATGG | 3′ UTR | 21 | 1044 |
| OSC51 | 1085-1107 | 1085 | TCCCTGGACACTCCCTATGGAGA | 3′ UTR | 21 | 1045 |
| OSC52 | 1088-1110 | 1088 | CTGGACACTCCCTATGGAGATCC | 3′ UTR | 21 | 1046 |
| OSC53 | 1129-1151 | 1129 | ACCTGCCACAGCCAGAACTGAGG | 3′ UTR | 21 | 1047 |
| OSC54 | 1163-1185 | 1163 | GGCAGCTCCCAGGGGGTAGAACG | 3′ UTR | 21 | 1048 |
| OSC55 | 1176-1198 | 1176 | GGGTAGAACGGCCCTGTGCTTAA | 3′ UTR | 21 | 1049 |
| OSC56 | 1182-1204 | 1182 | AACGGCCCTGTGCTTAAGACACT | 3′ UTR | 21 | 1050 |
| OSC57 | 1184-1206 | 1184 | CGGCCCTGTGCTTAAGACACTCC | 3′ UTR | 21 | 1051 |
| OSC58 | 1237-1259 | 1237 | TTGCTTCACATCCTCAAAAAAAA | 3′ UTR | 21 | 1052 |
| OSC59 | 1238-1260 | 1238 | TGCTTCACATCCTCAAAAAAAAA | 3′ UTR | 21 | 1053 |

TABLE 6A
LRP2 ANTISENSE TARGET

| | | | | | | SEQ |
|---|---|---|---|---|---|---|
| | Target | Start | | | | ID |
| ID | position | position | Target sequence | Location | Size | NO: |
| OSL1 | 512-534 | 512 | GTCAAGATTGCTCACAAAGTACA | CDS | 21 | 1054 |
| OSL2 | 566-588 | 566 | GTCAGTGTATCCCAAGTGAATAC | CDS | 21 | 1055 |
| OSL3 | 763-785 | 763 | TTGCACAATGAGTTTTCATGTGG | CDS | 21 | 1056 |
| OSL4 | 939-961 | 939 | TGGAGAAGATGACTGTAAAGATA | CDS | 21 | 1057 |
| OSL5 | 941-963 | 941 | GAGAAGATGACTGTAAAGATAAT | CDS | 21 | 1058 |
| OSL6 | 992-1014 | 992 | CTCATGATGTTCATAAATGTTCC | CDS | 21 | 1059 |
| OSL7 | 1053- | 1053 | CTCCATTTATAAAGTTTGTGATG | CDS | 21 | 1060 |
| | 1075 | | | | | |
| OSL8 | 1054- | 1054 | TCCATTTATAAAGTTTGTGATGG | CDS | 21 | 1061 |
| | 1076 | | | | | |
| OSL9 | 1119- | 1119 | TACCGGAAAATACTGTAGTATGA | CDS | 21 | 1062 |
| | 1141 | | | | | |
| OSL10 | 1121- | 1121 | CCGGAAAATACTGTAGTATGACT | CDS | 21 | 1063 |
| | 1143 | | | | | |
| OSL11 | 1267- | 1267 | TGCCAGATATGGGGAATTTGTGA | CDS | 21 | 1064 |
| | 1289 | | | | | |
| OSL12 | 1329- | 1329 | CTGTGAAGAAGGGTATATCTTGG | CDS | 21 | 1065 |
| | 1351 | | | | | |
| OSL13 | 1356- | 1356 | TGGACAGTATTGCAAAGCTAATG | CDS | 21 | 1066 |
| | 1378 | | | | | |
| OSL14 | 1360- | 1360 | CAGTATTGCAAAGCTAATGATTC | CDS | 21 | 1067 |
| | 1382 | | | | | |
| OSL15 | 1366- | 1366 | TGCAAAGCTAATGATTCCTTTGG | CDS | 21 | 1068 |
| | 1388 | | | | | |
| OSL16 | 1423- | 1423 | TTGTTAATTGGTGATATTCATGG | CDS | 21 | 1069 |
| | 1445 | | | | | |
| OSL17 | 1541- | 1541 | CCGTGCAAAATAAGGTTTTTTCA | CDS | 21 | 1070 |
| | 1563 | | | | | |
| OSL18 | 1543- | 1543 | GTGCAAAATAAGGTTTTTTCAGT | CDS | 21 | 1071 |
| | 1565 | | | | | |
| OSL19 | 1552- | 1552 | AAGGTTTTTTCAGTTGACATTAA | CDS | 21 | 1072 |
| | 1574 | | | | | |
| OSL20 | 1553- | 1553 | AGGTTTTTTCAGTTGACATTAAT | CDS | 21 | 1073 |
| | 1575 | | | | | |
| OSL21 | 1562- | 1562 | CAGTTGACATTAATGGTTTAAAT | CDS | 21 | 1074 |
| | 1584 | | | | | |
| OSL22 | 1565- | 1565 | TTGACATTAATGGTTTAAATATC | CDS | 21 | 1075 |
| | 1587 | | | | | |
| OSL23 | 1638- | 1638 | CTGGGTTAATAATAAAATCTATC | CDS | 21 | 1076 |
| | 1660 | | | | | |
| OSL24 | 1639- | 1639 | TGGGTTAATAATAAAATCTATCT | CDS | 21 | 1077 |
| | 1661 | | | | | |
| OSL25 | 1680- | 1680 | CCGCATAGATATGGTAAATTTGG | CDS | 21 | 1078 |
| | 1702 | | | | | |
| OSL26 | 1719- | 1719 | TACCCTTATAACTGAAAACTTGG | CDS | 21 | 1079 |
| | 1741 | | | | | |
| OSL27 | 1767- | 1767 | CCCAACTGTTGGTTATTTATTTT | CDS | 21 | 1080 |
| | 1789 | | | | | |
| OSL28 | 1772- | 1772 | CTGTTGGTTATTTATTTTTCTCA | CDS | 21 | 1081 |
| | 1794 | | | | | |
| OSL29 | 1895- | 1895 | GGGTAACTCTGGATATGATATCG | CDS | 21 | 1082 |
| | 1917 | | | | | |
| OSL30 | 1942- | 1942 | CGGTTTGATTACATTGAAACTGT | CDS | 21 | 1083 |
| | 1964 | | | | | |
| OSL31 | 1946- | 1946 | TTGATTACATTGAAACTGTAACT | CDS | 21 | 1084 |
| | 1968 | | | | | |
| OSL32 | 1951- | 1951 | TACATTGAAACTGTAACTTATGA | CDS | 21 | 1085 |
| | 1973 | | | | | |
| OSL33 | 2187- | 2187 | TGCTACCAATCCGTGTAAAGATA | CDS | 21 | 1086 |
| | 2209 | | | | | |
| OSL34 | 2437- | 2437 | TTCTTTGTCGGGATTGATTTTGA | CDS | 21 | 1087 |
| | 2459 | | | | | |
| OSL35 | 2469- | 2469 | CAGCACTATCTTTTTTTCAGATA | CDS | 21 | 1088 |
| | 2491 | | | | | |
| OSL36 | 2470- | 2470 | AGCACTATCTTTTTTTCAGATAT | CDS | 21 | 1089 |
| | 2492 | | | | | |
| OSL37 | 2491- | 2491 | ATGTCAAAACACATGATTTTTAA | CDS | 21 | 1090 |
| | 2513 | | | | | |
| OSL38 | 2498- | 2498 | AACACATGATTTTTAAGCAAAAG | CDS | 21 | 1091 |
| | 2520 | | | | | |
| OSL39 | 2558- | 2558 | GGGTGGAAAATGTTGAAAGTTTG | CDS | 21 | 1092 |
| | 2580 | | | | | |
| OSL40 | 2579- | 2579 | TGGCTTTTGATTGGATTTCAAAG | CDS | 21 | 1093 |
| | 2601 | | | | | |
| OSL41 | 2580- | 2580 | GGCTTTTGATTGGATTTCAAAGA | CDS | 21 | 1094 |
| | 2602 | | | | | |
| OSL42 | 2589- | 2589 | TTGGATTTCAAAGAATCTCTATT | CDS | 21 | 1095 |
| | 2611 | | | | | |
| OSL43 | 2590- | 2590 | TGGATTTCAAAGAATCTCTATTG | CDS | 21 | 1096 |
| | 2612 | | | | | |
| OSL44 | 2670- | 2670 | CACAGTAGTTCAGTATTTAAATA | CDS | 21 | 1097 |
| | 2692 | | | | | |
| OSL45 | 2672- | 2672 | CAGTAGTTCAGTATTTAAATAAC | CDS | 21 | 1098 |
| | 2694 | | | | | |
| OSL46 | 2714- | 2714 | ATCCTTTTGCCGGGTATCTATTC | CDS | 21 | 1099 |
| | 2736 | | | | | |
| OSL47 | 2800- | 2800 | CCTGTAATAAACACTACTCTT | CDS | 21 | 1394 |
| | 2820 | | | | | |
| OSL48 | 2869- | 2869 | TGGGTAGATGCCTATTTTGATAA | CDS | 21 | 1100 |
| | 2891 | | | | | |
| OSL49 | 2877- | 2877 | TGCCTATTTTGATAAAATTGAGC | CDS | 21 | 1101 |
| | 2899 | | | | | |
| OSL50 | 2971- | 2971 | GCCATCTTTGGAGAGCATTTATT | CDS | 21 | 1102 |
| | 2993 | | | | | |
| OSL51 | 3074- | 3074 | TTGCTTACATACTGCATTTGAAA | CDS | 21 | 1103 |
| | 3096 | | | | | |
| OSL52 | 3075- | 3075 | TGCTTACATACTGCATTTGAAAT | CDS | 21 | 1104 |
| | 3097 | | | | | |
| OSL53 | 3120- | 3120 | TGGTTCTAACGCCTGTAATCAAC | CDS | 21 | 1105 |
| | 3142 | | | | | |
| OSL54 | 3356- | 3356 | TCGATGATTGTCATGATAACAGT | CDS | 21 | 1106 |
| | 3378 | | | | | |
| OSL55 | 3546- | 3546 | CACCCAATACACCTGTGATAATC | CDS | 21 | 1107 |
| | 3568 | | | | | |
| OSL56 | 3547- | 3547 | ACCCAATACACCTGTGATAATCA | CDS | 21 | 1108 |
| | 3569 | | | | | |
| OSL57 | 3569- | 3569 | ACCAGTGTATCTCAAAGAACTGG | CDS | 21 | 1109 |
| | 3591 | | | | | |
| OSL58 | 3629- | 3629 | ATGAAAAGAACTGCAATTCGACA | CDS | 21 | 1110 |
| | 3651 | | | | | |
| OSL59 | 3681- | 3681 | CCCCAATCATCGATGTATTGACC | CDS | 21 | 1111 |
| | 3703 | | | | | |
| OSL60 | 3690- | 3690 | TCGATGTATTGACCTATCGTTTG | CDS | 21 | 1112 |
| | 3712 | | | | | |
| OSL61 | 3693- | 3693 | ATGTATTGACCTATCGTTTGTCT | CDS | 21 | 1113 |
| | 3715 | | | | | |
| OSL62 | 3828- | 3828 | TCGTTGTGATGGTGTTTTTGATT | CDS | 21 | 1114 |
| | 3850 | | | | | |
| OSL63 | 3945- | 3945 | CCCGAACTTCTGGGAATGTGATG | CDS | 21 | 1115 |
| | 3967 | | | | | |
| OSL64 | 3946- | 3946 | CCGAACTTCTGGGAATGTGATGG | CDS | 21 | 1116 |
| | 3968 | | | | | |
| OSL65 | 4015- | 4015 | CCCAAGACTTGCCCTTCATCATA | CDS | 21 | 1117 |
| | 4037 | | | | | |
| OSL66 | 4348- | 4348 | TTCTTACTTGCCAATGATTCTAA | CDS | 21 | 1118 |
| | 4370 | | | | | |
| OSL67 | 4379- | 4379 | AAGACATAGATGAATGTGATATT | CDS | 21 | 1119 |
| | 4401 | | | | | |
| OSL68 | 4381- | 4381 | GACATAGATGAATGTGATATTCT | CDS | 21 | 1120 |
| | 4403 | | | | | |
| OSL69 | 4455- | 4455 | GTGTGATACAGGCTACATGTTAG | CDS | 21 | 1121 |
| | 4477 | | | | | |
| OSL70 | 4464- | 4464 | AGGCTACATGTTAGAAAGTGATG | CDS | 21 | 1122 |
| | 4486 | | | | | |
| OSL71 | 4465- | 4465 | GGCTACATGTTAGAAAGTGATGG | CDS | 21 | 1123 |
| | 4487 | | | | | |
| OSL72 | 4597- | 4597 | GTCGAGAATGGTTCTTACATTGT | CDS | 21 | 1124 |
| | 4619 | | | | | |
| OSL73 | 4600- | 4600 | GAGAATGGTTCTTACATTGTAGC | CDS | 21 | 1125 |
| | 4622 | | | | | |
| OSL74 | 4612- | 4612 | TACATTGTAGCTGTTGATTTTGA | CDS | 21 | 1126 |
| | 4634 | | | | | |
| OSL75 | 4620- | 4620 | AGCTGTTGATTTTGATTCAATTA | CDS | 21 | 1127 |
| | 4642 | | | | | |
| OSL76 | 4622- | 4622 | CTGTTGATTTTGATTCAATTAGT | CDS | 21 | 1128 |
| | 4644 | | | | | |
| OSL77 | 4635- | 4635 | TTCAATTAGTGGTCGTATCTTTT | CDS | 21 | 1129 |
| | 4657 | | | | | |
| OSL78 | 4732- | 4732 | AGCATCATCTTGACTGAAACTAT | CDS | 21 | 1130 |
| | 4754 | | | | | |
| OSL79 | 4735- | 4735 | ATCATCTTGACTGAAACTATTGC | CDS | 21 | 1131 |
| | 4757 | | | | | |
| OSL80 | 4741- | 4741 | TTGACTGAAACTATTGCAATAGA | CDS | 21 | 1132 |
| | 4763 | | | | | |
| OSL81 | 4743- | 4743 | GACTGAAACTATTGCAATAGATT | CDS | 21 | 1133 |
| | 4765 | | | | | |
| OSL82 | 4745- | 4745 | CTGAAACTATTGCAATAGATTGG | CDS | 21 | 1134 |
| | 4767 | | | | | |
| OSL83 | 4806- | 4806 | AACAATTGAAGTCTCCAAAATTG | CDS | 21 | 1135 |
| | 4828 | | | | | |
| OSL84 | 4847- | 4847 | TGCTGATTAGTAAAAACCTAACA | CDS | 21 | 1136 |
| | 4869 | | | | | |
| OSL85 | 4883- | 4883 | TAGCATTAGATCCCAGAATGAAT | CDS | 21 | 1137 |
| | 4905 | | | | | |
| OSL86 | 4884- | 4884 | AGCATTAGATCCCAGAATGAATG | CDS | 21 | 1138 |
| | 4906 | | | | | |
| OSL87 | 4896- | 4896 | CAGAATGAATGAGCATCTACTGT | CDS | 21 | 1139 |
| | 4918 | | | | | |
| OSL88 | 5077- | 5077 | ATGGACTTTTGTGATTATAATGG | CDS | 21 | 1140 |
| | 5099 | | | | | |
| OSL89 | 5080- | 5080 | GACTTTTGTGATTATAATGGACA | CDS | 21 | 1141 |
| | 5102 | | | | | |
| OSL90 | 5126- | 5126 | GTGATTTGATTATACGGCA | CDS | 19 | 1142 |
| | 5144 | | | | | |
| OSL91 | 5241- | 5241 | GTCAGTTGTAATGTATAATATTC | CDS | 21 | 1143 |
| | 5263 | | | | | |
| OSL92 | 5246- | 5246 | TTGTAATGTATAATATTCAATGG | CDS | 21 | 1144 |
| | 5268 | | | | | |
| OSL93 | 5291- | 5291 | ATCCTTCGAAACAACCAAATTCC | CDS | 21 | 1145 |
| | 5313 | | | | | |
| OSL94 | 5295- | 5295 | TTCGAAACAACCAAATTCCGTGA | CDS | 21 | 1146 |
| | 5317 | | | | | |
| OSL95 | 5447- | 5447 | AACCTTTCTTAATAACTGTAAGG | CDS | 21 | 1147 |
| | 5469 | | | | | |
| OSL96 | 5467- | 5467 | AGGCAACATATAATTTTTGGAAT | CDS | 21 | 1148 |
| | 5489 | | | | | |
| OSL97 | 5468- | 5468 | GGCAACATATAATTTTTGGAATC | CDS | 21 | 1149 |
| | 5490 | | | | | |
| OSL98 | 5538- | 5538 | AGGGATACAGAATGGTTTAGATG | CDS | 21 | 1150 |
| | 5560 | | | | | |
| OSL99 | 5539- | 5539 | GGGATACAGAATGGTTTAGATGT | CDS | 21 | 1151 |
| | 5561 | | | | | |
| OSL100 | 5545- | 5545 | CAGAATGGTTTAGATGTTGAATT | CDS | 21 | 1152 |
| | 5567 | | | | | |
| OSL101 | 5584- | 5584 | TACATCTATTGGGTTGAAAATCC | CDS | 21 | 1153 |
| | 5606 | | | | | |
| OSL102 | 5644- | 5644 | AGGACAGTATTTGCTTCTATATC | CDS | 21 | 1154 |
| | 5666 | | | | | |
| OSL103 | 5648- | 5648 | CAGTATTTGCTTCTATATCTATG | CDS | 21 | 1155 |
| | 5670 | | | | | |
| OSL104 | 5677- | 5677 | CCTTCTATGAACCTGGCCTTA | CDS | 21 | 1156 |
| | 5697 | | | | | |
| OSL105 | 5692- | 5692 | GCCTTAGATTGGATTTCAAGAAA | CDS | 21 | 1157 |
| | 5714 | | | | | |
| OSL106 | 5701- | 5701 | TGGATTTCAAGAAACCTTTATTC | CDS | 21 | 1158 |
| | 5723 | | | | | |
| OSL107 | 5738- | 5738 | CTCAGTCAATCGAGGTTTTGACA | CDS | 21 | 1159 |
| | 5760 | | | | | |
| OSL108 | 5765- | 5765 | ACGGAGATATCAGATACAGAAAA | CDS | 21 | 1160 |
| | 5787 | | | | | |
| OSL109 | 5766- | 5766 | CGGAGATATCAGATACAGAAAAA | CDS | 21 | 1161 |
| | 5788 | | | | | |
| OSL110 | 5768- | 5768 | GAGATATCAGATACAGAAAAACA | CDS | 21 | 1162 |
| | 5790 | | | | | |
| OSL111 | 5775- | 5775 | CAGATACAGAAAAACATTGATTG | CDS | 21 | 1163 |
| | 5797 | | | | | |
| OSL112 | 6115- | 6115 | GTCCATGATTCTTTCCTTTATTA | CDS | 21 | 1164 |
| | 6137 | | | | | |
| OSL113 | 6116- | 6116 | TCCATGATTCTTTCCTTTATTAT | CDS | 21 | 1165 |
| | 6138 | | | | | |
| OSL114 | 6123- | 6123 | TTCTTTCCTTTATTATACTGATG | CDS | 21 | 1166 |
| | 6145 | | | | | |
| OSL115 | 6146- | 6146 | AACAGTATGAGGTCATTGAAAGA | CDS | 21 | 1167 |
| | 6168 | | | | | |
| OSL116 | 6202- | 6202 | TTGAGAGATAATGTTCCAAATCT | CDS | 21 | 1168 |
| | 6224 | | | | | |
| OSL117 | 6204- | 6204 | GAGAGATAATGTTCCAAATCTGA | CDS | 21 | 1169 |
| | 6226 | | | | | |
| OSL118 | 6206- | 6206 | GAGATAATGTTCCAAATCTGAGG | CDS | 21 | 1170 |
| | 6228 | | | | | |
| OSL119 | 6266- | 6266 | CCTCAAATGGCTGTAGCAA | CDS | 19 | 1171 |
| | 6284 | | | | | |
| OSL120 | 6387- | 6387 | CTCTCCATATAACTCTTTCATTG | CDS | 21 | 1172 |
| | 6409 | | | | | |
| OSL121 | 6390- | 6390 | TCCATATAACTCTTTCATTGTTG | CDS | 21 | 1173 |
| | 6412 | | | | | |
| OSL122 | 6397- | 6397 | AACTCTTTCATTGTTGTTTCAAT | CDS | 21 | 1174 |
| | 6419 | | | | | |
| OSL123 | 6399- | 6399 | CTCTTTCATTGTTGTTTCAATGC | CDS | 21 | 1175 |
| | 6421 | | | | | |
| OSL124 | 6425- | 6425 | CTGCAATCAGAGGCTTTAGCTTG | CDS | 21 | 1176 |
| | 6447 | | | | | |
| OSL125 | 6426- | 6426 | TGCAATCAGAGGCTTTAGCTTGG | CDS | 21 | 1177 |
| | 6448 | | | | | |
| OSL126 | 6434- | 6434 | GAGGCTTTAGCTTGGAATTGTCA | CDS | 21 | 1178 |
| | 6456 | | | | | |
| OSL127 | 6436- | 6436 | GGCTTTAGCTTGGAATTGTCAGA | CDS | 21 | 1179 |
| | 6458 | | | | | |
| OSL128 | 6445- | 6445 | TTGGAATTGTCAGATCATTCAGA | CDS | 21 | 1180 |
| | 6467 | | | | | |
| OSL129 | 6603- | 6603 | TGGATCTTCTCTGATGAACATTG | CDS | 21 | 1181 |
| | 6625 | | | | | |
| OSL130 | 6619- | 6619 | AACATTGTGACACATGGAATAGG | CDS | 21 | 1182 |
| | 6641 | | | | | |
| OSL131 | 6711- | 6711 | TTCTGAAACACTGATAGAAGTTC | CDS | 21 | 1183 |
| | 6733 | | | | | |
| OSL132 | 6725- | 6725 | TAGAAGTTCTGCGGATCAATACT | CDS | 21 | 1184 |
| | 6747 | | | | | |
| OSL133 | 6797- | 6797 | TTGTTGTAGATCCCAAGAACAGA | CDS | 21 | 1185 |
| | 6819 | | | | | |
| OSL134 | 6849- | 6849 | ACCAAAGATTGAGCGTTCTTTCC | CDS | 21 | 1186 |
| | 6871 | | | | | |
| OSL135 | 6939- | 6939 | CCGAAGTGATGGCTACGTTTATT | CDS | 21 | 1187 |
| | 6961 | | | | | |
| OSL136 | 6961- | 6961 | TGGGTTGATGATTCTTTAGATAT | CDS | 21 | 1188 |
| | 6983 | | | | | |
| OSL137 | 6965- | 6965 | TTGATGATTCTTTAGATATAATT | CDS | 21 | 1189 |
| | 6987 | | | | | |
| OSL138 | 7062- | 7062 | CACTGTTTTTGAAAATTCTATCA | CDS | 21 | 1190 |
| | 7084 | | | | | |
| OSL139 | 7064- | 7064 | CTGTTTTTGAAAATTCTATCATA | CDS | 21 | 1191 |
| | 7086 | | | | | |
| OSL140 | 7087- | 7087 | TGGGTAGATAGGAATTTGAAAAA | CDS | 21 | 1192 |
| | 7109 | | | | | |
| OSL141 | 7088- | 7088 | GGGTAGATAGGAATTTGAAAAAG | CDS | 21 | 1193 |
| | 7110 | | | | | |
| OSL142 | 7152- | 7152 | CACAGTGATAAGAGACAATATCA | CDS | 21 | 1194 |
| | 7174 | | | | | |
| OSL143 | 7154- | 7154 | CAGTGATAAGAGACAATATCAAC | CDS | 21 | 1195 |
| | 7176 | | | | | |
| OSL144 | 7348- | 7348 | GGCAAGAATTGTGCCATTTCAAC | CDS | 21 | 1196 |
| | 7370 | | | | | |
| OSL145 | 7351- | 7351 | AAGAATTGTGCCATTTCAACAGA | CDS | 21 | 1197 |
| | 7373 | | | | | |
| OSL146 | 7358- | 7358 | GTGCCATTTCAACAGAAAATTTC | CDS | 21 | 1198 |
| | 7380 | | | | | |
| OSL147 | 7359- | 7359 | TGCCATTTCAACAGAAAATTTCC | CDS | 21 | 1199 |
| | 7381 | | | | | |
| OSL148 | 7381- | 7381 | CTCATCTTTGCCTTGTCTAATTC | CDS | 21 | 1200 |
| | 7403 | | | | | |
| OSL149 | 7443- | 7443 | ACCTTTCCAAACAATAAATGTGG | CDS | 21 | 1201 |
| | 7465 | | | | | |
| OSL150 | 7486- | 7486 | GACTATGACAGTGTAAGTGATAG | CDS | 21 | 1202 |
| | 7508 | | | | | |
| OSL151 | 7494- | 7494 | CAGTGTAAGTGATAGAATCTACT | CDS | 21 | 1203 |
| | 7516 | | | | | |
| OSL152 | 7496- | 7496 | GTGTAAGTGATAGAATCTACTTC | CDS | 21 | 1204 |
| | 7518 | | | | | |
| OSL153 | 7506- | 7506 | TAGAATCTACTTCACACAAAATT | CDS | 21 | 1205 |
| | 7528 | | | | | |
| OSL154 | 7510- | 7510 | ATCTACTTCACACAAAATTTAGC | CDS | 21 | 1206 |
| | 7532 | | | | | |
| OSL155 | 7627- | 7627 | GCCTTTGACTGGATTACTAGAAG | CDS | 21 | 1207 |
| | 7649 | | | | | |
| OSL156 | 7633- | 7633 | GACTGGATTACTAGAAGAATTTA | CDS | 21 | 1208 |
| | 7655 | | | | | |
| OSL157 | 7635- | 7635 | CTGGATTACTAGAAGAATTTATT | CDS | 21 | 1209 |
| | 7657 | | | | | |
| OSL158 | 7636- | 7636 | TGGATTACTAGAAGAATTTATTA | CDS | 21 | 1210 |
| | 7658 | | | | | |
| OSL159 | 8007- | 8007 | GACTCTCTATGGCCAGTATATTT | CDS | 21 | 1211 |
| | 8029 | | | | | |
| OSL160 | 8036- | 8036 | CTGACTTGTACACACAAAGAATT | CDS | 21 | 1212 |
| | 8058 | | | | | |
| OSL161 | 8038- | 8038 | GACTTGTACACACAAAGAATTTA | CDS | 21 | 1213 |
| | 8060 | | | | | |
| OSL162 | 8044- | 8044 | TACACACAAAGAATTTACCGAGC | CDS | 21 | 1214 |
| | 8066 | | | | | |
| OSL163 | 8150- | 8150 | ACCAGAAACAACAGTGTAACAAT | CDS | 21 | 1215 |
| | 8172 | | | | | |
| OSL164 | 8152- | 8152 | CAGAAACAACAGTGTAACAATCC | CDS | 21 | 1216 |
| | 8174 | | | | | |
| OSL165 | 8167- | 8167 | AACAATCCTTGTGAACAGTTTAA | CDS | 21 | 1217 |
| | 8189 | | | | | |
| OSL166 | 8293- | 8293 | GTGGACAATGGTGAACGATGTGG | CDS | 21 | 1218 |
| | 8315 | | | | | |
| OSL167 | 8564- | 8564 | CGGAGTTTATGTGCAATAACAGA | CDS | 21 | 1219 |
| | 8586 | | | | | |
| OSL168 | 8566- | 8566 | GAGTTTATGTGCAATAACAGAAG | CDS | 21 | 1220 |
| | 8588 | | | | | |
| OSL169 | 8685- | 8685 | TGGATACACAAAATGTCATAATT | CDS | 21 | 1221 |
| | 8707 | | | | | |
| OSL170 | 8689- | 8689 | TACACAAAATGTCATAATTCAAA | CDS | 21 | 1222 |
| | 8711 | | | | | |
| OSL171 | 8691- | 8691 | CACAAAATGTCATAATTCAAATA | CDS | 21 | 1223 |
| | 8713 | | | | | |
| OSL172 | 8699- | 8699 | GTCATAATTCAAATATTTGTATT | CDS | 21 | 1224 |
| | 8721 | | | | | |
| OSL173 | 8715- | 8715 | TTGTATTCCTCGCGTTTATTTGT | CDS | 21 | 1225 |
| | 8737 | | | | | |
| OSL174 | 8768- | 8768 | GTGATGAAAACCCTACTTATTGC | CDS | 21 | 1226 |
| | 8790 | | | | | |
| OSL175 | 8844- | 8844 | TCCTCAACATTGGTATTGTGATC | CDS | 21 | 1227 |
| | 8866 | | | | | |
| OSL176 | 8854- | 8854 | TGGTATTGTGATCAAGAAACAGA | CDS | 21 | 1228 |
| | 8876 | | | | | |
| OSL177 | 8861- | 8861 | GTGATCAAGAAACAGATTGTTTT | CDS | 21 | 1229 |
| | 8883 | | | | | |
| OSL178 | 9063- | 9063 | TTCCGAGTTTCTCTGTGTAAATG | CDS | 21 | 1230 |
| | 9085 | | | | | |
| OSL179 | 9064- | 9064 | TCCGAGTTTCTCTGTGTAAATGA | CDS | 21 | 1231 |
| | 9086 | | | | | |
| OSL180 | 9153- | 9153 | CGGCTACGATGAGAATCAGAATT | CDS | 21 | 1232 |
| | 9175 | | | | | |
| OSL181 | 9181- | 9181 | AGGAGAACTTGCTCTGAAAATGA | CDS | 21 | 1233 |
| | 9203 | | | | | |
| OSL182 | 9221- | 9221 | GACTGTGTATCCCAAAGATATTC | CDS | 21 | 1234 |
| | 9243 | | | | | |
| OSL183 | 9308- | 9308 | GCCAACAGAATCAGTTTACCTGT | CDS | 21 | 1235 |
| | 9330 | | | | | |
| OSL184 | 9595- | 9595 | GACACCTTAACCAGTTTCTATTG | CDS | 21 | 1236 |
| | 9617 | | | | | |
| OSL185 | 9598- | 9598 | ACCTTAACCAGTTTCTATTGTTC | CDS | 21 | 1237 |
| | 9620 | | | | | |
| OSL186 | 9657- | 9657 | GACTTGTGTTGATATTGATGAAT | CDS | 21 | 1238 |
| | 9679 | | | | | |
| OSL187 | 9719- | 9719 | ATGTAATAGGCTCCTACATCTGT | CDS | 21 | 1239 |
| | 9741 | | | | | |
| OSL188 | 9786- | 9786 | CCGGCAAAACAGTAACATCGAAC | CDS | 21 | 1240 |
| | 9808 | | | | | |
| OSL189 | 9807- | 9807 | ACCCTATCTCATTTTTAGCAACC | CDS | 21 | 1241 |
| | 9829 | | | | | |
| OSL190 | 9826- | 9826 | AACCGTTACTATTTGAGAAATTT | CDS | 21 | 1242 |
| | 9848 | | | | | |
| OSL191 | 9827- | 9827 | ACCGTTACTATTTGAGAAATTTA | CDS | 21 | 1243 |
| | 9849 | | | | | |
| OSL192 | 9828- | 9828 | CCGTTACTATTTGAGAAATTTAA | CDS | 21 | 1244 |
| | 9850 | | | | | |
| OSL193 | 9832- | 9832 | TACTATTTGAGAAATTTAACTAT | CDS | 21 | 1245 |
| | 9854 | | | | | |
| OSL194 | 9838- | 9838 | TTGAGAAATTTAACTATAGATGG | CDS | 21 | 1246 |
| | 9860 | | | | | |
| OSL195 | 9849- | 9849 | AACTATAGATGGCTATTTTTACT | CDS | 21 | 1247 |
| | 9871 | | | | | |
| OSL196 | 9892- | 9892 | GACAATGTTGTGGCATTAGATTT | CDS | 21 | 1248 |
| | 9914 | | | | | |
| OSL197 | 9925- | 9925 | GAGAAGAGATTGTATTGGATTGA | CDS | 21 | 1249 |
| | 9947 | | | | | |
| OSL198 | 9956- | 9956 | GGCAAGTCATTGAGAGAATGTTT | CDS | 21 | 1250 |
| | 9978 | | | | | |
| OSL199 | 9987- | 9987 | GACAAACAAGGAGACAATCATAA | CDS | 21 | 1251 |
| | 10009 | | | | | |
| OSL200 | 10272- | 10272 | AACCAACAAGTCTGTGATAATCT | CDS | 21 | 1252 |
| | 10294 | | | | | |
| OSL201 | 10444- | 10444 | TTCGCTATTACCATTTTTGAAGA | CDS | 21 | 1253 |
| | 10466 | | | | | |
| OSL202 | 10446- | 10446 | CGCTATTACCATTTTTGAAGACA | CDS | 21 | 1254 |
| | 10468 | | | | | |
| OSL203 | 10499- | 10499 | CAGTGGAAAAGGGAAACAAATAT | CDS | 21 | 1255 |
| | 10521 | | | | | |
| OSL204 | 10513- | 10513 | AACAAATATGATGGATCAAATAG | CDS | 21 | 1256 |
| | 10535 | | | | | |
| OSL205 | 10574- | 10574 | TCCATGTGTACCATCCATATAGG | CDS | 21 | 1257 |
| | 10596 | | | | | |
| OSL206 | 10958- | 10958 | CTGATGAAGACCGTCTTCTTTGT | CDS | 21 | 1258 |
| | 10980 | | | | | |
| OSL207 | 11246- | 11246 | GTGACAACTTCACAGAATTCAGC | CDS | 21 | 1259 |
| | 11268 | | | | | |
| OSL208 | 11623- | 11623 | CAGTGTACAAGTGGACATTGTGT | CDS | 21 | 1260 |
| | 11645 | | | | | |
| OSL209 | 11625- | 11625 | GTGTACAAGTGGACATTGTGTAC | CDS | 21 | 1261 |
| | 11647 | | | | | |
| OSL210 | 11745- | 11745 | TACTATGTTCGAATGCAAAAACC | CDS | 21 | 1262 |
| | 11767 | | | | | |
| OSL211 | 11749- | 11749 | ATGTTCGAATGCAAAAACCATGT | CDS | 21 | 1263 |
| | 11771 | | | | | |
| OSL212 | 11757- | 11757 | ATGCAAAAACCATGTTTGTATCC | CDS | 21 | 1264 |
| | 11779 | | | | | |
| OSL213 | 11779- | 11779 | CCGCCATATTGGAAATGTGATGG | CDS | 21 | 1265 |
| | 11801 | | | | | |
| OSL214 | 11820- | 11820 | TGGTTCAGATGAAGAACTTCACC | CDS | 21 | 1266 |
| | 11842 | | | | | |
| OSL215 | 11887- | 11887 | GACAACAATCGCTGCATTTATAG | CDS | 21 | 1267 |
| | 11909 | | | | | |
| OSL216 | 11984- | 11984 | CCCCTAAACCTTGTACAGAATAT | CDS | 21 | 1268 |
| | 12006 | | | | | |
| OSL217 | 11985- | 11985 | CCCTAAACCTTGTACAGAATATG | CDS | 21 | 1269 |
| | 12007 | | | | | |
| OSL218 | 11990- | 11990 | AACCTTGTACAGAATATGAATAT | CDS | 21 | 1270 |
| | 12012 | | | | | |
| OSL219 | 11991- | 11991 | ACCTTGTACAGAATATGAATATA | CDS | 21 | 1271 |
| | 12013 | | | | | |
| OSL220 | 11994- | 11994 | TTGTACAGAATATGAATATAAGT | CDS | 21 | 1272 |
| | 12016 | | | | | |
| OSL221 | 12083- | 12083 | CCGATGAACTGGGTTGCAATAAA | CDS | 21 | 1273 |
| | 12105 | | | | | |
| OSL222 | 12114- | 12114 | AAGAACATGTGCTGAAAATATAT | CDS | 21 | 1274 |
| | 12136 | | | | | |
| OSL223 | 12140- | 12140 | AGCAAAATTGTACCCAATTAAAT | CDS | 21 | 1275 |
| | 12162 | | | | | |
| OSL224 | 12193- | 12193 | GGGTTCGAAACCAATGTTTTTGA | CDS | 21 | 1276 |
| | 12215 | | | | | |
| OSL225 | 12197- | 12197 | TCGAAACCAATGTTTTTGACAGA | CDS | 21 | 1277 |
| | 12219 | | | | | |
| OSL226 | 12389- | 12389 | CTGACAATGTCCGAATTCGAAAA | CDS | 21 | 1278 |
| | 12411 | | | | | |
| OSL227 | 12397- | 12397 | GTCCGAATTCGAAAATATAATCT | CDS | 21 | 1279 |
| | 12419 | | | | | |
| OSL228 | 12399- | 12399 | CCGAATTCGAAAATATAATCTCT | CDS | 21 | 1280 |
| | 12421 | | | | | |
| OSL229 | 12435- | 12435 | CTCAGAGTATCTTCAAGATGAGG | CDS | 21 | 1281 |
| | 12457 | | | | | |
| OSL230 | 12443- | 12443 | ATCTTCAAGATGAGGAATATATC | CDS | 21 | 1282 |
| | 12465 | | | | | |
| OSL231 | 12537- | 12537 | GGGCTCTAGGTTTGGTGCTATCAAA | CDS | 25 | 1283 |
| | 12561 | | | | | |
| OSL232 | 12564- | 12564 | TGCCTACATCCCCAACTTTGAAT | CDS | 21 | 1284 |
| | 12586 | | | | | |
| OSL233 | 12608- | 12608 | AGGAAGTTGACCTGAAACTGAAA | CDS | 21 | 1285 |
| | 12630 | | | | | |
| OSL234 | 12616- | 12616 | GACCTGAAACTGAAATACGTAAT | CDS | 21 | 1286 |
| | 12638 | | | | | |
| OSL235 | 12617- | 12617 | ACCTGAAACTGAAATACGTAATG | CDS | 21 | 1287 |
| | 12639 | | | | | |
| OSL236 | 12705 | 12705 | ACGCATTGAGGTGGCTAAACTTG | CDS | 21 | 1288 |
| | 12727 | | | | | |
| OSL237 | 12792- | 12792 | TCCCAAACTAGGGCTTATGTTCT | CDS | 21 | 1289 |
| | 12814 | | | | | |
| OSL238 | 12825- | 12825 | GGGAAAGGAACCTAAAATCGAGT | CDS | 21 | 1290 |
| | 12847 | | | | | |
| OSL239 | 12870- | 12870 | CCGCAACATCCTGGTTTTCGAGG | CDS | 21 | 1291 |
| | 12892 | | | | | |
| OSL240 | 12911- | 12911 | GCCTTTCTATCGATTATTTGAAC | CDS | 21 | 1292 |
| | 12933 | | | | | |
| OSL241 | 12915- | 12915 | TTCTATCGATTATTTGAACAATG | CDS | 21 | 1293 |
| | 12937 | | | | | |
| OSL242 | 12965- | 12965 | AGGACGTTATTGAAACCATAAAA | CDS | 21 | 1294 |
| | 12987 | | | | | |
| OSL243 | 12967 | 12967 | GACGTTATTGAAACCATAAAATA | CDS | 21 | 1295 |
| | 12989 | | | | | |
| OSL244 | 12968- | 12968 | ACGTTATTGAAACCATAAAATAT | CDS | 21 | 1296 |
| | 12990 | | | | | |
| OSL245 | 12995- | 12995 | GGACTGATAGGAGAGTCATTGCAAA | CDS | 21 | 1297 |
| | 13019 | | | | | |
| OSL246 | 13058- | 13058 | ACCAGTTATACTGGATATCTAAG | CDS | 25 | 1298 |
| | 13080 | | | | | |
| OSL247 | 13086- | 13086 | GGGAGAAGTATGGAAACAAAATA | CDS | 21 | 1299 |
| | 13108 | | | | | |
| OSL248 | 13091- | 13091 | AAGTATGGAAACAAAATAAATTT | CDS | 21 | 1300 |
| | 13113 | | | | | |
| OSL249 | 13175- | 13175 | TTCATCAACTCAGATACAATAAG | CDS | 21 | 1301 |
| | 13197 | | | | | |
| OSL250 | 13368- | 13368 | CGGAGGAAATTGCTATTTTGATG | CDS | 21 | 1302 |
| | 13390 | | | | | |
| OSL251 | 13371- | 13371 | AGGAAATTGCTATTTTGATGAGA | CDS | 21 | 1303 |
| | 13393 | | | | | |
| OSL252 | 13428- | 13428 | CACCGGAAAATATTGTGAAATGG | CDS | 21 | 1304 |
| | 13450 | | | | | |
| OSL253 | 13440- | 13440 | TTGTGAAATGGCGTTTTCAAAAG | CDS | 21 | 1305 |
| | 13462 | | | | | |
| OSL254 | 13541- | 13541 | CAGGATTCTTCCACTATAGAAGG | CDS | 21 | 1306 |
| | 13563 | | | | | |
| OSL255 | 13659- | 13659 | GGCAGATCTTAACATGGATATTG | CDS | 21 | 1307 |
| | 13681 | | | | | |
| OSL256 | 13725- | 13725 | GGCAATGAGTGAAGACTTTGTCA | CDS | 21 | 1308 |
| | 13747 | | | | | |
| OSL257 | 13842- | 13842 | ATCTGAAAATGTGGATAATAAGA | CDS | 21 | 1309 |
| | 13864 | | | | | |
| OSL258 | 13844- | 13844 | CTGAAAATGTGGATAATAAGAAT | CDS | 21 | 1310 |
| | 13866 | | | | | |
| OSL259 | 13852- | 13852 | GTGGATAATAAGAATTATGGAAG | CDS | 21 | 1311 |
| | 13874 | | | | | |
| OSL260 | 13853- | 13853 | TGGATAATAAGAATTATGGAAGT | CDS | 21 | 1312 |
| | 13875 | | | | | |
| OSL261 | 13951- | 13951 | TGGAATCTCTTCAAACGAAAATC | CDS | 21 | 1313 |
| | 13973 | | | | | |
| OSL262 | 13955- | 13955 | ATCTCTTCAAACGAAAATCTAAA | CDS | 21 | 1314 |
| | 13977 | | | | | |
| OSL263 | 13957- | 13957 | CTCTTCAAACGAAAATCTAAACA | CDS | 21 | 1315 |
| | 13979 | | | | | |
| OSL264 | 13960- | 13960 | TTCAAACGAAAATCTAAACAAAC | CDS | 21 | 1316 |
| | 13982 | | | | | |
| OSL265 | 13964- | 13964 | AACGAAAATCTAAACAAACTACC | CDS | 21 | 1317 |
| | 13986 | | | | | |
| OSL266 | 13976- | 13976 | AACAAACTACCAACTTTGAAAAT | CDS | 21 | 1318 |
| | 13998 | | | | | |
| OSL267 | 13983- | 13983 | TACCAACTTTGAAAATCCAATCT | CDS | 21 | 1319 |
| | 14005 | | | | | |
| OSL268 | 13987- | 13987 | AACTTTGAAAATCCAATCTATGC | CDS | 21 | 1320 |
| | 14009 | | | | | |
| OSL269 | 14121- | 14121 | TGCAACAGAAGACACTTTTAAAG | CDS | 21 | 1321 |
| | 14143 | | | | | |
| OSL270 | 14145- | 14145 | CACCGCAAATCTTGTTAAAGAAG | CDS | 21 | 1322 |
| | 14167 | | | | | |
| OSL271 | 14148- | 14148 | CGCAAATCTTGTTAAAGAAGACT | CDS | 21 | 1323 |
| | 14170 | | | | | |
| OSL272 | 14169- | 14169 | CTCTGAAGTATAGCTATACCAGC | CDS/3′- | 21 | 1324 |
| | 14191 | | | UTR | | |
| OSL273 | 14186- | 14186 | ACCAGCTATTTAGGGAATAATTA | 3′-UTR | 21 | 1325 |
| | 14208 | | | | | |
| OSL274 | 14188- | 14188 | CAGCTATTTAGGGAATAATTAGA | 3′-UTR | 21 | 1326 |
| | 14210 | | | | | |
| OSL275 | 14211- | 14211 | AACACACTTTTGCACATATATTT | 3′-UTR | 21 | 1327 |
| | 14233 | | | | | |
| OSL276 | 14213- | 14213 | CACACTTTTGCACATATATTTTT | 3′-UTR | 21 | 1328 |
| | 14235 | | | | | |
| OSL277 | 14236- | 14236 | TACAAACAGATGAAAAAAGTTAA | 3′-UTR | 21 | 1329 |
| | 14258 | | | | | |
| OSL278 | 14252- | 14252 | AAGTTAACATTCAGTACTTTATG | 3′-UTR | 21 | 1330 |
| | 14274 | | | | | |
| OSL279 | 14261- | 14261 | TTCAGTACTTTATGAAAAAAATA | 3′-UTR | 21 | 1331 |
| | 14283 | | | | | |
| OSL280 | 14263- | 14263 | CAGTACTTTATGAAAAAAATATA | 3′-UTR | 21 | 1332 |
| | 14285 | | | | | |
| OSL281 | 14341- | 14341 | CCGTCTCATATTTTTACAAATAA | 3′-UTR | 21 | 1333 |
| | 14363 | | | | | |
| OSL282 | 14355- | 14355 | TACAAATAATTATCACAATGTAC | 3′-UTR | 21 | 1334 |
| | 14377 | | | | | |
| OSL283 | 14366- | 14366 | ATCACAATGTACTATATGTATAT | 3′-UTR | 21 | 1335 |
| | 14388 | | | | | |
| OSL284 | 14368- | 14368 | CACAATGTACTATATGTATATCT | 3′-UTR | 21 | 1336 |
| | 14390 | | | | | |
| OSL285 | 14372- | 14372 | ATGTACTATATGTATATCTTTGC | 3′-UTR | 21 | 1337 |
| | 14394 | | | | | |
| OSL286 | 14396- | 14396 | CTGAAGTTGTCTGAAGGTAATAC | 3′-UTR | 21 | 1338 |
| | 14418 | | | | | |
| OSL287 | 14406- | 14406 | CTGAAGGTAATACTATAAATATA | 3′-UTR | 21 | 1339 |
| | 14428 | | | | | |
| OSL288 | 14437- | 14437 | TTGTAAATTTTGGAAAGATTATC | 3′-UTR | 21 | 1340 |
| | 14459 | | | | | |
| OSL289 | 14447- | 14447 | TGGAAAGATTATCCTGTTACTGA | 3′-UTR | 21 | 1341 |
| | 14469 | | | | | |
| OSL290 | 14451- | 14451 | AAGATTATCCTGTTACTGAATTT | 3′-UTR | 21 | 1342 |
| | 14473 | | | | | |
| OSL291 | 14457- | 14457 | ATCCTGTTACTGAATTTGCTAAT | 3′-UTR | 21 | 1343 |
| | 14479 | | | | | |
| OSL292 | 14458- | 14458 | TCCTGTTACTGAATTTGCTAATA | 3′-UTR | 21 | 1344 |
| | 14480 | | | | | |
| OSL293 | 14464- | 14464 | TACTGAATTTGCTAATAAAGATG | 3′-UTR | 21 | 1345 |
| | 14486 | | | | | |
| OSL294 | 14503- | 14503 | GTGATCATTATAGTAAATGATCC | 3′-UTR | 21 | 1346 |
| | 14525 | | | | | |
| OSL295 | 14513- | 14513 | TAGTAAATGATCCAACAAGAAAA | 3′-UTR | 21 | 1347 |
| | 14535 | | | | | |
| OSL296 | 14523- | 14523 | TCCAACAAGAAAAGGAATTGACT | 3′-UTR | 21 | 1348 |
| | 14545 | | | | | |
| OSL297 | 14579- | 14579 | CACTCATATTTCCTATAAAATTA | 3′-UTR | 21 | 1349 |
| | 14601 | | | | | |
| OSL298 | 14581. | 14581 | CTCATATTTCCTATAAAATTATC | 3′-UTR | 21 | 1350 |
| | 14603 | | | | | |
| OSL299 | 14633- | 14633 | GTCCATTTTTACACATTAGCACT | 3′-UTR | 21 | 1351 |
| | 14655 | | | | | |
| OSL300 | 14649- | 14649 | TAGCACTTAATTAATGTTCAATA | 3′-UTR | 21 | 1352 |
| | 14671 | | | | | |
| OSL301 | 14650- | 14650 | AGCACTTAATTAATGTTCAATAT | 3′-UTR | 21 | 1353 |
| | 14672 | | | | | |
| OSL302 | 14652- | 14652 | CACTTAATTAATGTTCAATATTA | 3′-UTR | 21 | 1354 |
| | 14674 | | | | | |
| OSL303 | 14665- | 14665 | TTCAATATTACATGTCAATTTGA | 3′-UTR | 21 | 1355 |
| | 14687 | | | | | |
| OSL304 | 14684- | 14684 | TTGATTAATGGCTATGTTGATAG | 3′-UTR | 21 | 1356 |
| | 14706 | | | | | |
| OSL305 | 14708- | 14708 | GGCCACTATGTGTTGTATAGACA | 3′-UTR | 21 | 1357 |
| | 14730 | | | | | |
| OSL306 | 14711- | 14711 | CACTATGTGTTGTATAGACATCT | 3′-UTR | 21 | 1358 |
| | 14733 | | | | | |
| OSL307 | 14767- | 14767 | AGGTAGGAAAAGCAATTCAGTTT | 3′-UTR | 21 | 1359 |
| | 14789 | | | | | |
| OSL308 | 14856- | 14856 | GCCAAGACAACATTTTTATTTGT | 3′-UTR | 21 | 1360 |
| | 14878 | | | | | |
| OSL309 | 14861- | 14861 | GACAACATTTTTATTTGTGATGT | 3′-UTR | 21 | 1361 |
| | 14883 | | | | | |
| OSL310 | 14886- | 14886 | ATGAGGAAATCCCATATCATTAA | 3′-UTR | 21 | 1362 |
| | 14908 | | | | | |
| OSL311 | 14921- | 14921 | TGCATTGAGTTTGTGGTTAATTA | 3′-UTR | 21 | 1363 |
| | 14943 | | | | | |
| OSL312 | 14925- | 14925 | TTGAGTTTGTGGTTAATTAAATG | 3′-UTR | 21 | 1364 |
| | 14947 | | | | | |
| OSL313 | 15034 | 15034 | AGCTGAATTTCTGAAACCAAATC | 3′-UTR | 21 | 1365 |
| | 15056 | | | | | |
| OSL314 | 15049- | 15049 | ACCAAATCTGTGTCTTCATAAAA | 3′-UTR | 21 | 1366 |
| | 15071 | | | | | |
| OSL315 | 15115- | 15115 | TGGGTTTTTGTTTCTATGAAAAT | 3′-UTR | 21 | 1367 |
| | 15137 | | | | | |
| OSL316 | 15122- | 15122 | TTGTTTCTATGAAAATATCATTA | 3′-UTR | 21 | 1368 |
| | 15144 | | | | | |
| OSL317 | 15126- | 15126 | TTCTATGAAAATATCATTATAAT | 3′-UTR | 21 | 1369 |
| | 15148 | | | | | |
| OSL318 | 15130- | 15130 | ATGAAAATATCATTATAATCACT | 3′-UTR | 21 | 1370 |
| | 15152 | | | | | |
| OSL319 | 15138- | 15138 | ATCATTATAATCACTATTTATTT | 3′-UTR | 21 | 1371 |
| | 15160 | | | | | |
| OSL320 | 15188- | 15188 | AACCATTCTTATTAAGCTTTTTA | 3′-UTR | 21 | 1372 |
| | 15210 | | | | | |
| OSL321 | 15189- | 15189 | ACCATTCTTATTAAGCTTTTTAT | 3′-UTR | 21 | 1373 |
| | 15211 | | | | | |
| OSL322 | 15220- | 15220 | GTGGCTAAATGTGTACATTTATA | 3′-UTR | 21 | 1374 |
| | 15242 | | | | | |
| OSL323 | 15221- | 15221 | TGGCTAAATGTGTACATTTATAT | 3′-UTR | 21 | 1375 |
| | 15243 | | | | | |
| OSL324 | 15222- | 15222 | GGCTAAATGTGTACATTTATATT | 3′-UTR | 21 | 1376 |
| | 15244 | | | | | |
| OSL325 | 15228- | 15228 | ATGTGTACATTTATATTAGAATG | 3′-UTR | 21 | 1377 |
| | 15250 | | | | | |
| OSL326 | 15263- | 15263 | CAGATCTTTTCTTTAATTCTTAT | 3′-UTR | 21 | 1378 |
| | 15285 | | | | | |
| OSL327 | 15266- | 15266 | ATCTTTTCTTTAATTCTTATTGG | 3′-UTR | 21 | 1379 |
| | 15288 | | | | | |
| OSL328 | 15271- | 15271 | TTCTTTAATTCTTATTGGTTTTT | 3′-UTR | 21 | 1380 |
| | 15293 | | | | | |
| OSL329 | 15438- | 15438 | CTCTTAAATAGTGGGTATAGTCT | 3′-UTR | 21 | 1381 |
| | 15460 | | | | | |
| OSL330 | 15524- | 15524 | GTGCTAATATTGCACATTTGTTA | 3′-UTR | 21 | 1382 |
| | 15546 | | | | | |
| OSL331 | 15525- | 15525 | TGCTAATATTGCACATTTGTTAA | 3′-UTR | 21 | 1383 |
| | 15547 | | | | | |
| OSL332 | 15575- | 15575 | ATGGATGAATGAATGAAACATAT | 3′-UTR | 21 | 1384 |
| | 15597 | | | | | |
| OSL333 | 15583- | 15583 | ATGAATGAAACATATACTACTGA | 3′-UTR | 21 | 1385 |
| | 15605 | | | | | |
| OSL334 | 15587- | 15587 | ATGAAACATATACTACTGATTAT | 3′-UTR | 21 | 1386 |
| | 15609 | | | | | |
| OSL335 | 15591- | 15591 | AACATATACTACTGATTATTTTA | 3′-UTR | 21 | 1387 |
| | 15613 | | | | | |
| OSL336 | 15655- | 15655 | CTGACTGTAATTACTTTGATTAG | 3′-UTR | 21 | 1388 |
| | 15677 | | | | | |
| OSL337 | 15659- | 15659 | CTGTAATTACTTTGATTAGATAA | 3′-UTR | 21 | 1389 |
| | 15681 | | | | | |
| OSL338 | 15675- | 15675 | TAGATAAACAACTGGAAATAATG | 3′-UTR | 21 | 1390 |
| | 15697 | | | | | |
| OSL339 | 15698- | 15698 | CTGCTGAAAAAGTTCTAATAAAT | 3′-UTR | 21 | 1391 |
| | 15720 | | | | | |
| OSL340 | 15699- | 15699 | TGCTGAAAAAGTTCTAATAAATG | 3′-UTR | 21 | 1392 |
| | 15721 | | | | | |

TABLE 11
Additional table of siRNA sequences

| SEQ | | antisense sequence | | sense sequence | SEQ ID |
|---|---|---|---|---|---|
| ID | OSID | (5′ to 3′) | OSID | (3′ to 5′) | NO:S |
| 957 | OSC17C-1 | CAGUUGCGCAGUUUCUUGUC | OSC17B-1 | [dT][dT]GUCAACGCGUCA | 973 |
| | | AGUUC[dT][dT] | | AAGAACAGUCAAG | |
| 958 | OSC17C-2 | CAGUUGCGCAGUUUCUUGU | OSC17B-2 | [dT][dT]*G*UCAACGCGUC | 974 |
| | | [mC][mA]GUUC[dT][dT] | | AAAGAACAGUCAAG | |
| 959 | OSC17C-3 | CAGUUGCGCAGUUUCU[mU] | OSC17B-3 | [dT][dT]*G*UCAACGCGUC | 975 |
| | | [mG]UCAGUUC[dT][dT] | | AAAGAACAG[mU]CAAG | |
| 960 | OSC17C-4 | CAGUUGCGCAGUUUCU[mU] | OSC17B-4 | [dT][dT]*G*UCAACGCGUC | 976 |
| | | [mG]U[mC][mA]GUUC[dT] | | AAAGAA[mC]AGUCAAG | |
| | | [dT] | | | |
| | | | OSC17B-5 | [dT][dT]*G*UCAACGCGUC | 977 |
| | | | | AAAGAA[mC]AG[mU]CAA | |
| | | | | G | |
| | | | OSC17B-6 | [dT][dT]*G*UCAA[mC]GCG | 978 |
| | | | | UCAAAGAA[mC]AG[mU]C | |
| | | | | AAG | |
| 961 | OSC47C-1 | AAGAGCUCAGGUCUCUGAGG | OSC47B-1 | [dT][dT]UUCUCGAGUCCA | 979 |
| | | G[dT][dT] | | GAGACUCCC | |
| 962 | OSC47C-2 | AAGAGCUCAGGUCUC[mU]GA | OSC47B-2 | [dT][dT]*U*UCUCGAGUCC | 980 |
| | | GGG[dT][dT] | | AGAGACUCCC | |
| 963 | OSC47C-3 | AAGAGCUCAGGUCUC[mU][mG] | OSC47B-3 | [dT][dT]*U*UCUCGAGUCC | 981 |
| | | AGGG[dT][dT] | | AGAGA[mC]UCCC | |
| | | | OSC47B-4 | [dT][dT]*U*UCUCGAGUCC | 982 |
| | | | | AGAG[mA][mC]UCCC | |
| | | | OSC47B-5 | [dT][dT]*U*UCUCGAG[mU] | 983 |
| | | | | CCAGAG[mA][mC]UCCC | |
| 964 | OSL231C-1 | UUUGAUAGCACCAAACCUAGA | OSL231B-1 | [dT][dT]AAACUAUCGUGG | 984 |
| | | GCCC[dT][dT] | | UUUGGAUCUCGGG | |
| 965 | OSL231C-2 | UUUGA[mU]AG[mC]ACCAAACC | OSL231B-2 | [dT][dT]*A*AACUAUCGUG | 985 |
| | | [mU]AGAGCCC[dT][dT] | | GUUUGGAUCUCGGG | |
| 966 | OSL231C-3 | UUUGAUAGCACCAAACC[mU] | OSL231B-3 | [dT][dT]*A*AACUA[mU]CG | 986 |
| | | [mA]GAGCCC[dT][dT] | | [mU]GGUUUGGA[mU]CUC | |
| | | | | GGG | |
| 967 | OSL231C-4 | UUUGAUAG[mC]ACCAAACC | OSL231B-4 | [dT][dT]*A*AACU[mA][mU] | 987 |
| | | [mU]AGAGCCC[dT][dT] | | C[mG][mU]GGUUUGG[mA] | |
| | | | | [mU]CUCGGG | |
| 968 | OSL231C-5 | UUUGAUAGCACCAAACC[mU]A | OSL231B-5 | [dT][dT]*A*AACUGUCGUG | 988 |
| | | GAGCCC[dT][dT] | | GUUUGGA[mU]CUCGGG | |
| | | | OSL231B-6 | [dT][dT]*A*AACUGUCG | 989 |
| | | | | [mU]GGUUUGGA[mU]CUCG | |
| | | | | GG | |
| | | | OSL231B-7 | [dT][dT]*A*AACUAUCGUG | 990 |
| | | | | G[mU]UUGGAUCUCGGG | |
| 969 | OSL245C-1 | UUUGCAAUGACUCUCCUAUCA | OSL245B-1 | [dT][dT]AAACGUUACUGA | 991 |
| | | GUCC[dT][dT] | | GAGGAUAGUCAGG | |
| 970 | OSL245C-2 | UUUGCAA[mU][mG]ACUCUCC | OSL245B-2 | [dT][dT]*A*AACG[mU]UA | 992 |
| | | [mU][mA]UCAGUCC[dT][dT] | | [mC]UGAGAGGA[mU]AGUC | |
| | | | | AGG | |
| 971 | OSL245C-3 | UUUGCAAUGACUCUCC[mU] | OSL245B-3 | [dT][dT]*A*AACGUUACUG | 993 |
| | | [mA]UCAGUCC[dT][dT] | | AGAGGA[mU]AGUCAGG | |
| 972 | OSL245C-4 | UUUGCAA[mU][mG]ACUCUCCU | OSL245B-4 | [dT][dT]*A*AACGUUA[mC] | 994 |
| | | AUCAGUCC[dT][dT] | | UGAGAGGA[mU]AGUCAG | |
| | | | | G | |
| | | | OSL245B-5 | [dT][dT]*A*AACGUUACUG | 995 |
| | | | | AGAGGAUAGUCAGG | |

Key to modifications
[dT] = DNA base (T) within RNA oligo
[mA], [mG], [mC], [mU] = 2′O-Methyl RNA
* = Phosphorothioate linkages

[0170] In one embodiment, an RNAi (e.g., a dsRNA) featured herein includes a first sequence of a dsRNA that is selected from the group including the sense sequences of any table herein and a second sequence that is selected from the group consisting of the corresponding antisense sequences of any table herein. A corresponding antisense sequence is a nucleotide sequence within the OSID family for example OSC17. In those instances when we refer to an siRNA with no suffix (e.g., OSC17), we mean that to indicate the dsRNA comprised of the antisense and sense strands corresponding to that number (e.g., OSC17A paired with OSC17S or OSC17C-(n) paired with OSC17B-(n) where “n” is any number of the OSC17 family).

[0171] Unless otherwise specified, the compounds provided herein may be enantiomerically pure, such as a single enantiomer or a single diastereomer, or be stereoisomeric mixtures, such as a mixture of enantiomers, e.g., a racemic mixture of two enantiomers; or a mixture of two or more diastereomers. Conventional techniques for the preparation/isolation of individual enantiomers include synthesis from a suitable optically pure precursor, asymmetric synthesis from achiral starting materials, or resolution of an enantiomeric mixture, for example, chiral chromatography, recrystallization, resolution, diastereomeric salt formation, or derivatization into diastereomeric adducts followed by separation. It is understood that the phosphorothioate group, designated by an asterisk (*), constitutes a stereogenic center, and the presence of each such group in a sequence engenders two diastereoisomers. The number of such diastereoisomers in a double stranded RNAi agent may be calculated by the formula 2\hat{ }n, wherein n represents the number of phosphorothioate groups in a sequence comprised of a double stranded siRNA.

[0172] In some embodiments, the antisense strand (identified with “A” in the OS ID name) and/or the sense strand (identified with “S” in the OS ID name) of an RNAi agent comprises or consists of a nucleobase sequence, for example, “OSC17A-1” CAGUUGCGCAGUUUCUUGUCAGUUC[dT][dT] (SEQ ID NO: 17), and the nucleobase sequence may include at least one or more nucleotides as a modified nucleotide, and wherein SEQ ID NO: 17 is located at positions 1 to 25 (5′→3′) of the antisense strand and forms a duplex with the corresponding sense strand (identified as OSC17S-1. In some embodiments, the antisense strand of an RNAi agent comprises or consists of a nucleobase sequence for example CAGUUGCGCAGUUUCUUGUCAGUUC[dT][dT] (SEQ ID NO: 17), wherein all or substantially all or 1, 2, 3, 4 or 5 of the nucleotides are modified nucleotides (see for example SEQ ID NO. 24), and wherein SEQ ID NO: 24 is located at positions 1 to 27 (5′→3′) of the antisense strand. For any antisense or sense strand disclosed herein, in some embodiments, the antisense strand of an RNAi agent comprises or consists of the sequence (5′→3′) wherein * is a phosphorothioate linkage between deoxy thymine [dT]; and/or wherein mC, mA, mG, mU are 2′-O-methyl cytidine, 2′-O-methyl adenine, 2′-O-methyl guanosine, 2′-O-methyl uridine respectively; and/or wherein 2fA, 2fU, 2fG, 2fC are 2′-fluoro adenine, 2′-fluoro uridine, 2′-fluoro guanosine, and 2′-fluoro cytosine respectively. The antisense target on the mRNA is identified with the same name but without the notation of “A” or “S” after the name. An antisense sequence with the same name, for example OSC17A-1 through OSC17A-18 binds to the same nucleotide target sequence.

[0173] Sequences shown in Table 4 were transfected into HEK 293 (human embryonic kidney) and MDA-MB-435S (human melanoma) cell lines to determine their ability to reduce the protein expression of LRP2 and CD320 gene/protein. These two cell lines were chosen because of their relatively high expression levels of LRP2 as noted in the Human Protein Atlas at world wide web.proteinatlas.org and the NCI-60 gene expression profiles at discover.nci.nih.gov/cellminer/so that a change in protein expression for LRP2 was easy to detect.

[0174] Referring now to FIGS. 3A-B and FIG. 3D-E, HEK293 and MDA-MB-231 cells were transfected with 20 nM of indicated siRNAs and incubated for 48 hours. Whole cell lysates were prepared and immunoblotted for CD320 and LRP2 protein levels. The protein levels were normalized to a housekeeping control gene unaffected by the siRNA transfection. The graphs represent the fold change of protein levels compared to the scrambled siRNA control (OSS1). (Average−/+SEM is shown, n=3).

[0175] CD320 and LRP2 protein levels were determined by western blot and quantified by Image Studio Software (LiCor Company), relative to a control protein that is not affected by CD320 or LRP2 knockdown. To determine the efficacy of knockdown, protein levels of CD320 (FIGS. 3A-B) and LRP2 (FIGS. 3 D-E) on the samples that were exposed to siRNA sequences against the mRNA of either gene, were compared to that in the untreated and scrambled controls (black and gray bars, respectively, in all graphs of FIG. 3). We found that both siRNA sequences directed against CD320 (OSC17 and OSC47) almost completely abrogated CD320 expression (circles in FIG. 3A-B). siLRP2 sequences resulted in variable efficiency in reducing LRP2 protein. Two sequences (OSL231 and OSL245) consistently reduced LRP2 levels 75% or more in both cell lines (circles FIGS. 3 B, E).

[0176] Referring now to FIG. 6, lysates were made from transformed (HEK293) and representative cancer cell lines, and western blot was performed to determine LRP2 protein levels. The cancer cells screened have low levels of LRP2 expression. The results represent the averages+SEM of three independent lysates. The data suggests that the cancer cells screened have very low levels of LRP2 expression.

[0177] We transfected a panel of LRP2 and CD320 siRNAs into cancer cell lines derived from multiple tissues and analyzed the levels of LRP2 protein and CD320 protein in the cell line. Representative cell lines from prostate, breast and glioblastoma, and normal fibroblasts were exposed to CD320 and LRP2 siRNAs in an experimental set-up similar to that described for HEK293 and MDA-MB-435S cells. The results are shown in FIGS. 3 C, F, and FIG. 4.

[0178] Referring now to FIGS. 3 C, F; and FIG. 4, MDA-MB-231 LnCAP, MCF-7 and U251 cells were exposed to siRNA sequences to knockdown CD320 (FIG. 3C, and FIGS. 4A-C) and LRP2 (FIG. 3 F, and FIGS. 4 D-F), in a similar fashion as described for the data represented in FIGS. 3A, B, D, and E. CD320 protein knockdown FIG. 3C, and FIG. 4A-C, compared to the untreated or scrambled controls, is more than 90% for all cell lines tested. LRP2 knockdown is accomplished in all cell lines too. However, the level of knockdown is less in the LnCAP cells compared to the other cell lines and the sequences that are effective may differ as well (FIG. 3 F, and FIGS. 4 D-F).

[0179] Referring now to FIG. 5, an experimental set up similar to that described in FIG. 3 was employed. Additional prostate and brain cancer cell lines, as well as normal fibroblast, were exposed to siRNAs directed against CD320. Levels of CD320 were nearly abrogated in DU-145 (prostate) cells, whereas the levels of knockdown in A172 brain cells and normal fibroblasts were 21%-33% and 25%-28%, respectively (FIG. 5A-C).

[0180] From these studies we can conclude that two siRNAs to CD320 (OSC17 and OSC47) are very effective in knocking down CD320 protein levels (80% or more), in nearly every cell line tested. While LRP2 is theoretically harder to knock down because of its size, we have identified two siRNAs, OSL231 and OSL245, that consistently knock down LRP2 in most cell lines in which we can detect LRP2.

[0181] In addition, LRP2 protein expression levels are very high in HEK 293 cells and easily detectable by western blot. Cancer cell lines have much lower expression of LRP2 compared to HEK293 cells as measured by western blot (FIG. 6), and some cell lines may contain LRP2 at levels below reliable detection.

[0182] Referring now to FIG. 7, the effects of doxorubicin treatment on cell viability, as measured by the CTG assay, are illustrated. A172 and HCC15 cells were plated at 1200 cells/well in a 96 well plate. The next day, cells were treated with doxorubicin at the indicated concentrations. Four days after the doxorubicin exposure was initiated, the cells were assayed for viability using the CTG assay. The line indicates the non-linear fitting of the data to calculate an IC₅₀ value. Instead of visually assessing the effect of CD320/LRP2 gene expression knockdown on cell proliferation (as shown for shRNA-mediated CD320/LRP2 knockdown in FIG. 2), a functional assay for quantitating the effect on cell viability of the simultaneous knockdown of LRP2 and CD320 by siRNA was developed. A widely used assay for the measurement of cell viability is the Promega Cell-titer GLO® platform (CTG), which quantifies ATP levels in the cell (live cells produce ATP, dead cells do not). After incubating the cells with the CTG reagent, ATP levels can be indirectly measured as light production using the TECAN luminescence plate reader. As a first step, toxicity of a known chemotherapeutic drug, doxorubicin, was assayed on the cell lines of interest. Doxorubicin was used as a positive control for cell toxicity in our assay. Representative data from A172 brain cancer cells (FIG. 7A) and HCC15 lung cancer cells (FIG. 7B) exposed to doxorubicin are shown in FIG. 7. From this data, the IC₅₀ of doxorubicin treatment on these cell lines was determined: 132 nm for A172 cells and 167 nm for HCC15 cells. Based upon these findings, a larger screen was initiated to determine the IC₅₀ of doxorubicin in several cancer and non-cancer cell lines, to determine the doxorubicin dose to use when cell lines are used in the viability assay to test the simultaneous knockdown of CD320 and LRP2. The results of the cell lines tested are summarized in Table 8 IC₅₀ determination of doxorubicin.

[0183] To quantify the effects of knocking down CD320 and LRP2 on cell proliferation, cells are plated in a 24-well plate. The next day, the cells are transfected with siRNAs to CD320 and/or LRP2. The cell lines may require repeated transfections and/or time for efficient toxicity (cell line dependent). In this experimental set-up there is room for repeat infection should some cell lines require that for efficient toxicity. At the end of the study, the cell lines are analyzed for cell growth by the CTG assay. A schematic of this experimental setup is presented in FIG. 8.

TABLE 8

| Cancer type | Cell line | IC₅₀ (nM) |
|---|---|---|
| Glioblastoma | A172 | 132 |
| | U251 | 24 |
| Breast | MDA-MB-231 | 43 |
| | MCF7 | 121 |
| Prostate | DU145 | 248 |
| | PC3 | 387 |
| Lung | NCI-H460 | 56 |
| | A549 | 126 |
| | HCC15 | 167 |
| Melanoma | MDA-MB-435S | 325 |
| Other | GM05659 | 267 |
| | HEK293 | 29 |

[0184] The cells lines were plated at 1,000 to 4,000 cells/well in a 96-well plate and treated with doxorubicin the following day. CTG activity was measured 4 days after treatment. IC₅₀ values were calculated by GraphPad Prism Software. Results are tabulated in Table 8.

[0185] These data show that doxorubicin works efficiently on this CTG platform (i.e., doxorubicin kills cancer cells) and can thus be used as a positive control in the in vitro assay to compare the cytotoxic effects of siRNA-knockdown of CD320 and LRP2. In this latter assay, normal or cancer cells are transfected with individual or combinations of siRNAs sequences that are targeting CD320 or LRP2 specifically or control siRNAs, similar to the experiments that provided the data for FIGS. 3, 4, and 5. In FIGS. 3, 4, and 5, protein levels are measured, but in the in vitro assay, cell viability is measured.

[0186] Referring now to FIG. 8, an overview of a functional assay for screening (ds) siRNA effects on cell proliferation is illustrated. To quantify the effects of knocking down CD320 and LRP2 on cell proliferation, cells are plated in a 24-well plate. The next day, the cells are transfected with siRNAs to CD320 and/or LRP2. The cell lines may require repeated transfections and/or time for efficient toxicity (cell line dependent). In this experimental set-up there is room for repeat infection should some cell lines require that for efficient toxicity. At the end of the study, the cell lines were analyzed for cell growth by the CTG assay.

[0187] Now, referring to FIG. 10B, MDA-MB-231 triple negative breast cancer cells were plated in a 24-well plate at 20,000 cells/well. Cells were transfected the next day with an siRNA selected from the group of OSC17, OSC47, OSL231, and OSL245 at 20 nM. Cells were also transfected with combinations of two siRNAs each of 10 nM, one of these targeting CD320 and the other LRP2, with the siRNAs targeting CD320 selected from the group of OSC17 and OSC47, and the LRP2 targeting siRNAs selected from the group of OSL231 and OSL245, each dosed at 10 nM. Cells were repeated transfected 4 times over the course of 11 days as indicated in Table 9. At day 11, cells were analyzed for cell growth by the CTG assay. The percent cell survival compared to the non-targeting control (OSS2) is shown. The data represented is the average of 6 experiments−/+SEM.

[0188] Now, referring to FIG. 11, MDA-MB-231 and DU-145 cells were transfected with 20 nM of the negative control siRNA (OSS2), 20 nM siRNA targeting CD320 (OSC17), or 20 nM siRNA targeting LRP2 (OSL245). Cells were also transfected with a combination of a CD320 targeting siRNA (OSC17) and LRP2 targeting siRNA (OSL24), over a range of concentrations (2-20 nM), so the concentration of the two siRNAs equaled 20 nM total siRNA transfected, as indicated in FIG. 11. Cells were repeatedly transfected as indicated in Table 9, and the percent cell survival is shown.

[0189] Now, referring to FIG. 12, MDA-MB-231 breast cancer cells were transfected with 20 nM of the negative control siRNA (OSS2), 20 nM siRNA targeting CD320 (OSC17), or 20 nM siRNA targeting LRP2 (OSL245). Each day, over five days, lysates were prepared. Western blotting was performed on the lysates for CD320 protein levels (FIG. 12A) or LRP2 protein levels (FIG. 12B).

[0190] Referring now to FIG. 9 and FIG. 10, data quantifying the effects of knocking down CD320 and LRP2 in various cell lines is represented. Cell lines representative of several types of cancers or normal fibroblasts were transfected with individual or combinations of siRNAs to CD320 or LRP2 as indicated. Cells were repeatedly transfected as outlined in Table 9 for efficient toxicity, then assayed for viability by the CTG assay. Doxorubicin treated cells served as a positive control for cell toxicity in our assays.

[0191] The data of the individual experiments presented in FIG. 9 and FIG. 10 and additional cell lines we have screened are summarized in Table 9. These experiments show the broad applicability of siCD320 and siLRP2 toxicity in a variety of cancer types.

[0192] Referring now to FIG. 13, a schematic of PEI and siRNA complexes is illustrated. PEI and siRNAs are mixed together. Subsequently, polyplexes (a nanoparticle, broadly speaking) form of the PEI-siRNA complex, which are able to enter the cell via an endocytotic or pinocytotic mechanism.

[0193] Referring now to FIG. 14, siRNAs are short RNA duplexes of generally 16 to 30 nucleotides; the sequence of the siRNA is complementary to a mRNA expressed in the cell. Exogenous siRNA duplexes are introduced into the cell via a method of transfection. The siRNA duplexes are unwound via the RISC (RNA-induced silencing complex) complex, whereby the guide strand of the siRNA hybridizes with its complementary mRNA molecule. The mRNA is degraded by the RISC/AGO complex, which has RNAse cleave activity. The end result is that the mRNA targeted by the siRNA is degraded, and the protein encoded by the mRNA is not produced. This causes the “knockdown” effect or reduced protein levels of the gene targeted by the siRNA compared to control-treated cells.

[0194] Referring now to FIG. 15 effectiveness of INTERFERin in delivering siRNAs to cancer cells is illustrated. 2 nM of indicated siRNAs were transfected into A172 and MDA-MB-435S cells as per the manufacturers protocol. Cell lysates were prepared 3 days post-infection and analyzed by western blot for CD320 protein levels. OSS1 and OSS2 are non-targeting siRNA controls. In this experiment, both sequences were tested. CD320 protein levels were knocked down to 9% to 18% for A172 cells and 26% to 48% for MDA-MB-435S cells, compared to OSS1. Much more efficient knockdown of CD320 is observed when the siRNAs were delivered with other transfection reagents (e.g. RNAiMAX, Viromer Blue) that were used in the experiments described previously particularly for MDA-MB-435S cells. The Polyplus INTERFERin platform has been tested in vitro in our laboratory in a proof of principle experiment, whereby the platform is able to deliver siRNAs to the target cells in vitro.

[0195] Referring now to FIG. 16, treatment of breast, prostate, and skin cancer cells with an inhibitor of CD320 receptor or an inhibitor of LRP2 receptor or a combination of both in an amount effective to inhibit proliferation of the cancer cells as compared to the control cells treated with control SiRNA is illustrated. MDA-MB-231, DU145, LnCAP, and MDA-MB-435S cells were plated at 20,000 cells per well in a 24-well plate. The next day, the cells were transected with 20 nM of indicated siRNAs to knock down CD320, LRP2, or scrambled control. For the combination of siRNAs, cells were treated with 10 nM of each siRNA for 20 nM total treatments. Cells were repeatedly transfected as in Table 9 for the length of time indicated in Table 9. The indicated pictures of the cells were taken at the end of the experiment.

TABLE 9
Summary of functional siRNA data screening

| | | | | Single siRNA | | | | Double siRNA | | | | |
|---|---|---|---|---|---|---|---|---|---|---|---|---|
| | | | | knockdown | | | | knockdown | | | | |
| | | | | (siCD320) | | (siLRP2) | | OSC17+ | | OSC47+ | | |
| | | # of | Days | OSC- | OSO- | OSL- | OSL- | OSL | OSL | OSL | OSL | |
| Cell line | n | txns | expt | 17 | 47 | 231 | 245 | 231 | 245 | 231 | 245 | DOX |
| Normal | | | | | | | | | | | | |
| GM05659 | 3 | 4 | 7 | 133 | 104 | 96 | 103 | 111 | 129 | 97 | 107 | 39 |
| Lung | | | | | | | | | | | | |
| HCC15 | 3 | 2 | 7 | 86 | 109 | 68 | 92 | 81 | 93 | 38 | 105 | 2 |
| H157 | 3 | 5 | 8 | 7 | 9 | 116 | 33 | 119 | 39 | 31 | 15 | 20 |
| Melanoma | | | | | | | | | | | | |
| MDA-MB-435S | 4 | 5 | 10 | 119 | 108 | 92 | 31 | 122 | 56 | 103 | 70 | 51 |
| Prostate | | | | | | | | | | | | |
| LnCAP | 3 | 4 | 7 | 52 | 42 | 72 | 60 | 68 | 51 | 52 | 57 | 38 |
| DU-145 | 6 | 4 | 7 | 39 | 82 | 71 | 44 | 80 | 44 | 90 | 76 | 40 |
| Glioblastoma | | | | | | | | | | | | |
| A172 | 3 | 5 | 7 | 94 | 17 | 50 | 101 | 73 | 107 | 19 | 51 | 8 |
| U251 | 4 | 6 | 8 | 94 | 50 | 77 | 97 | 99 | 94 | 66 | 87 | 51 |
| Breast | | | | | | | | | | | | |
| MCF-7 | 3 | 2 | 7 | 61 | 69 | 32 | 68 | 31 | 52 | 26 | 48 | 5 |
| MDA-MB-231 | 6 | 4 | 11 | 66 | 81 | 130 | 77 | 71 | 44 | 81 | 61 | 7 |

Note:
The numbers represent percent survival compared to negative control OSS2.

[0196] A murine human tumor xenograft model was established using triple-negative breast cancer cells (MDA-MB-231) injected into the flanks of nude mice to test the efficacy of combined dosing of OSC17 and OSL245. The administration of the drug is by repeated dosing over a range of drug concentrations using intratumoral, iv, ip or specialized route of administration. The dosing schedule is based on pilot studies to determine the tolerability of the delivery vehicle and the drug and will incorporate ranges that are taught in the art. Among the delivery platforms are nanoparticles, liposomes, micelles, polymers, small molecule conjugates, aptamers and antibody conjugates. Hybrid technologies containing elements of the aforementioned delivery systems are also known.

[0197] The manufacturing process consists of synthesizing the two single strand oligonucleotides of the duplex by conventional solid phase oligonucleotide synthesis. After purification, the two oligonucleotides are annealed into the duplex.

[0198] In vivo JetPEI® is a cationic polymer delivery system that binds the negatively charged siRNA molecules to the cationic polyamine polymer. Its use has been reported in xenograft models using MCF-7 (breast), MDA-MB-231 (breast) and A549 (lung) cell lines both ip and intratumoral. This delivery system is currently used in seven human clinical trials (Table 10). The formulated siRNAs are reported to be very stable.

TABLE 10
Clinical trial use of in vivo-jetPEI ®

| Organization | Type of study | Phase |
|---|---|---|
| Cancer Targeting Systems | Imaging and cancer | Pre-clinical |
| | therapy | |
| Benitec | Lung metastases | Pre-clinical |
| Avena | Blood-brain barrier | Pre-clinical |
| BiOncoTech | Melanoma immunotherapy | Phase 1 |
| Ottawa Hospital Research | Acute myocardial infarction | Phase 1 |
| Institute | gene therapy | |
| CHU-Toulouse, Rangueil | Pancreatic cancer gene | Phase 2 |
| Hospital | therapy | |
| BioCancell | Bladder cancer gene | Phase 3 |
| | therapy | |

[0199] Note that in the specification and claims, “about” or “approximately” means within twenty percent (20%) of the numerical amount cited. Although the invention has been described in detail with particular reference to these embodiments, other embodiments can achieve the same results. For example, antisense oligonucleotides that are complimentary to the target mRNA can inhibit expression of the protein of interest even though the antisense oligonucleotide is not provided as a dsRNA and may not bind to RISC/AGO complex. Variations and modifications of the present invention will be obvious to those skilled in the art and it is intended to cover in the appended claims all such modifications and equivalents. The entire disclosures of all references, applications, patents, and publications cited above are hereby incorporated by reference.

What is claimed is:

1. An isolated cell comprising a double stranded RNAi agent combination of (i) a first double-stranded ribonucleic acid (dsRNA) for inhibiting the expression of a CD320 gene wherein the first dsRNA comprises a sense strand and an antisense strand forming a duplex, and (ii) a second dsRNA for inhibiting the expression of a LRP2 gene wherein the second dsRNA comprises a sense strand and an antisense strand forming a duplex, and wherein the sense strand of the first dsRNA is at least substantially complementary to the antisense strand of the first dsRNA and the sense strand of the second dsRNA is at least substantially complementary to the antisense strand of the second dsRNA wherein the antisense strand of (i) the first dsRNA is selected from SEQ ID NO:1-93 and the antisense strand of (ii) the second dsRNA is selected from SEQ ID NO: 187-560 wherein * is a phosphorothioate linkage.

2. A pharmaceutical composition for inhibiting expression of a CD320 gene and a LRP2 gene, the pharmaceutical composition comprising a combination of (i) a first double-stranded ribonucleic acid (dsRNA) for inhibiting the expression of a CD320 gene wherein the first dsRNA comprises a sense strand and an antisense strand forming a duplex, and (ii) a second dsRNA for inhibiting the expression of a LRP2 gene wherein the second dsRNA comprises a sense strand and an antisense strand forming a duplex, and wherein the sense strand of the first dsRNA is at least substantially complementary to the antisense strand of the first dsRNA and the sense strand of the second dsRNA is at least substantially complementary to the antisense strand of the second dsRNA wherein the antisense strand of (i) the first dsRNA is selected from SEQ ID NO:1-93 and the antisense strand of (ii) the second dsRNA is selected from SEQ ID NO: 187-560 wherein * is a phosphorothioate linkage; and an excipient.

3. A method for inhibiting proliferation of a cancer cell (CC) comprising contacting of the CC with an inhibitor of CD320 expression and an inhibitor of LRP2 expression in an amount effective to inhibit proliferation of the CC, wherein the inhibitor of CD320 expression is a first double-stranded ribonucleic acid (dsRNA) comprising a sense strand and an antisense strand forming a duplex, and the inhibitor of LRP2 expression is a second dsRNA comprising a sense strand and an antisense strand forming a duplex, wherein the sense strand of the first dsRNA is at least substantially complementary to the antisense strand of the first dsRNA and the sense strand of the second dsRNA is at least substantially complementary to the antisense strand of the second dsRNA wherein the CC is from a skin cancer and wherein the antisense strand of (i) the first dsRNA is selected from SEQ ID NO:1-93 and the antisense strand of (ii) the second dsRNA is selected from SEQ ID NO: 187-560 wherein * is a phosphorothioate linkage.

4. The method of claim 3 wherein the contacting of the CC with an inhibitor of CD320 expression and an inhibitor of LRP2 expression is topical.

5. A method for treating skin cancer in a subject comprising administering to a subject an inhibitor of CD320 expression and an inhibitor of LRP2 expression in an amount effective to inhibit proliferation or kill cancer cells (CC) of the skin cancer wherein the CC is from the skin cancer and wherein the inhibitor is a combination of (i) a first double-stranded ribonucleic acid (dsRNA) for inhibiting the expression of a CD320 gene wherein the first dsRNA comprises a sense strand and an antisense strand forming a duplex, and (ii) a second dsRNA for inhibiting the expression of a LRP2 gene wherein the second dsRNA comprises a sense strand and an antisense strand forming a duplex, and wherein the sense strand of the first dsRNA is at least substantially complementary to the antisense strand of the first dsRNA and the sense strand of the second dsRNA is at least substantially complementary to the antisense strand of the second dsRNA wherein the antisense strand of (i) the first dsRNA is selected from SEQ ID NO:1-93 and the antisense strand of (ii) the second dsRNA is selected from SEQ ID NO: 187-560 wherein * is a phosphorothioate linkage.

6. The method of claim 5 wherein the step of administering is topical administration to the skin cancer of the subject being treated.

7. A method for treating cancer in a subject who has recurring or relapsed cancer comprising administering to a subject an inhibitor of CD320 expression and an inhibitor of LRP2 expression in an amount effective to inhibit proliferation or kill cancer cells (CC) of the cancer wherein the CC is from a skin cancer and wherein the inhibitor is a combination of (i) a first double-stranded ribonucleic acid (dsRNA) for inhibiting the expression of a CD320 gene wherein the first dsRNA comprises a sense strand and an antisense strand forming a duplex, and (ii) a second dsRNA for inhibiting the expression of a LRP2 gene wherein the second dsRNA comprises a sense strand and an antisense strand forming a duplex, and wherein the sense strand of the first dsRNA is at least substantially complementary to the antisense strand of the first dsRNA and the sense strand of the second dsRNA is at least substantially complementary to the antisense strand of the second dsRNA wherein the antisense strand of (i) the first dsRNA is selected from SEQ ID NO:1-93 and the antisense strand of (ii) the second dsRNA is selected from SEQ ID NO: 187-560 wherein * is a phosphorothioate linkage.

8. The method of claim 7 wherein the step of administering is topical administration to the skin cancer of the subject being treated.

The application's sequence listing, which the Patent Office published only in electronic form, follows.

SEQUENCE LISTING (1394 sequences)

SEQ ID NO: 1 - RNA, 23 nt, synthetic construct
  modified_base 22..23: mod_base = OTHER; note = thymine
  misc_feature 1..23: note = Description of Artificial Sequence: Synthetic oligonucleotide
  source 1..23: mol_type = other RNA
tcttatccctgcgcacgcgcatt

SEQ ID NO: 2 - RNA, 23 nt, synthetic construct
  modified_base 22..23: mod_base = OTHER; note = thymine
  misc_feature 1..23: note = Description of Artificial Sequence: Synthetic oligonucleotide
  source 1..23: mol_type = other RNA
tctcttatccctgcgcacgcgtt

SEQ ID NO: 3 - RNA, 23 nt, synthetic construct
  modified_base 22..23: mod_base = OTHER; note = thymine
  misc_feature 1..23: note = Description of Artificial Sequence: Synthetic oligonucleotide
  source 1..23: mol_type = other RNA
atgctgtccccacagcggcgctt

SEQ ID NO: 4 - RNA, 23 nt, synthetic construct
  modified_base 22..23: mod_base = OTHER; note = thymine
  misc_feature 1..23: note = Description of Artificial Sequence: Synthetic oligonucleotide
  source 1..23: mol_type = other RNA
atccaaccgccgctcatgctgtt

SEQ ID NO: 5 - RNA, 23 nt, synthetic construct
  modified_base 22..23: mod_base = OTHER; note = thymine
  misc_feature 1..23: note = Description of Artificial Sequence: Synthetic oligonucleotide
  source 1..23: mol_type = other RNA
tggaaagcgggctcgcggcggtt

SEQ ID NO: 6 - RNA, 23 nt, synthetic construct
  modified_base 22..23: mod_base = OTHER; note = thymine
  misc_feature 1..23: note = Description of Artificial Sequence: Synthetic oligonucleotide
  source 1..23: mol_type = other RNA
aacttggtgggtgggcacgagtt

SEQ ID NO: 7 - RNA, 23 nt, synthetic construct
  modified_base 22..23: mod_base = OTHER; note = thymine
  misc_feature 1..23: note = Description of Artificial Sequence: Synthetic oligonucleotide
  source 1..23: mol_type = other RNA
tggaacttggtgggtgggcactt

SEQ ID NO: 8 - RNA, 23 nt, synthetic construct
  modified_base 22..23: mod_base = OTHER; note = thymine
  misc_feature 1..23: note = Description of Artificial Sequence: Synthetic oligonucleotide
  source 1..23: mol_type = other RNA
actggaacttggtgggtgggctt

SEQ ID NO: 9 - RNA, 23 nt, synthetic construct
  modified_base 22..23: mod_base = OTHER; note = thymine
  misc_feature 1..23: note = Description of Artificial Sequence: Synthetic oligonucleotide
  source 1..23: mol_type = other RNA
taagccactggtgcggcactgtt

SEQ ID NO: 10 - RNA, 23 nt, synthetic construct
  modified_base 22..23: mod_base = OTHER; note = thymine
  misc_feature 1..23: note = Description of Artificial Sequence: Synthetic oligonucleotide
  source 1..23: mol_type = other RNA
acgcataagccactggtgcggtt

SEQ ID NO: 11 - RNA, 23 nt, synthetic construct
  modified_base 22..23: mod_base = OTHER; note = thymine
  misc_feature 1..23: note = Description of Artificial Sequence: Synthetic oligonucleotide
  source 1..23: mol_type = other RNA
tccaagtccctgtcgcagcgctt

SEQ ID NO: 12 - RNA, 23 nt, synthetic construct
  modified_base 22..23: mod_base = OTHER; note = thymine
  misc_feature 1..23: note = Description of Artificial Sequence: Synthetic oligonucleotide
  source 1..23: mol_type = other RNA
tcctcatcgctgccatcgctgtt

SEQ ID NO: 13 - RNA, 23 nt, synthetic construct
  modified_base 22..23: mod_base = OTHER; note = thymine
  misc_feature 1..23: note = Description of Artificial Sequence: Synthetic oligonucleotide
  source 1..23: mol_type = other RNA
tcactgacgccggtgcaggggtt

SEQ ID NO: 14 - RNA, 23 nt, synthetic construct
  modified_base 22..23: mod_base = OTHER; note = thymine
  misc_feature 1..23: note = Description of Artificial Sequence: Synthetic oligonucleotide
  source 1..23: mol_type = other RNA
ttgtcagttcccccagagcagtt

SEQ ID NO: 15 - RNA, 23 nt, synthetic construct
  modified_base 22..23: mod_base = OTHER; note = thymine
  misc_feature 1..23: note = Description of Artificial Sequence: Synthetic oligonucleotide
  source 1..23: mol_type = other RNA
ttcttgtcagttcccccagagtt

SEQ ID NO: 16 - RNA, 23 nt, synthetic construct
  modified_base 22..23: mod_base = OTHER; note = thymine
  misc_feature 1..23: note = Description of Artificial Sequence: Synthetic oligonucleotide
  source 1..23: mol_type = other RNA
agtttcttgtcagttcccccatt

SEQ ID NO: 17 - RNA, 27 nt, synthetic construct
  modified_base 26..27: mod_base = OTHER; note = thymine
  misc_feature 1..27: note = Description of Artificial Sequence: Synthetic oligonucleotide
  source 1..27: mol_type = other RNA
cagttgcgcagtttcttgtcagttctt

SEQ ID NO: 18 - RNA, 27 nt, synthetic construct
  modified_base 26..27: mod_base = OTHER; note = thymine
  misc_feature 1..27: note = Description of Artificial Sequence: Synthetic oligonucleotide
  source 1..27: mol_type = other RNA
cagttgcgcagtttcttgtcagttctt

SEQ ID NO: 19 - RNA, 27 nt, synthetic construct
  modified_base 26..27: mod_base = OTHER; note = thymine
  misc_feature 1..27: note = Description of Artificial Sequence: Synthetic oligonucleotide
  source 1..27: mol_type = other RNA
cagttgcgcagtttcttgtcagttctt

SEQ ID NO: 20 - RNA, 27 nt, synthetic construct
  modified_base 26..27: mod_base = OTHER; note = thymine
  misc_feature 1..27: note = Description of Artificial Sequence: Synthetic oligonucleotide
  source 1..27: mol_type = other RNA
cagttgcgcagtttcttgtcagttctt

SEQ ID NO: 21 - RNA, 25 nt, synthetic construct
  misc_feature 1..25: note = Description of Artificial Sequence: Synthetic oligonucleotide
  source 1..25: mol_type = other RNA
cagttgcgcagtttcttgtcagttc

SEQ ID NO: 22 - RNA, 25 nt, synthetic construct
  misc_feature 1..25: note = Description of Artificial Sequence: Synthetic oligonucleotide
  source 1..25: mol_type = other RNA
cagttgcgcagtttcttgtcagttc

SEQ ID NO: 23 - RNA, 27 nt, synthetic construct
  modified_base 26..27: mod_base = OTHER; note = thymine
  misc_feature 1..27: note = Description of Artificial Sequence: Synthetic oligonucleotide
  source 1..27: mol_type = other RNA
cagttgcgcagtttcttgtcagttctt

SEQ ID NO: 24 - RNA, 27 nt, synthetic construct
  modified_base 26..27: mod_base = OTHER; note = thymine
  misc_feature 1..27: note = Description of Artificial Sequence: Synthetic oligonucleotide
  source 1..27: mol_type = other RNA
cagttgcgcagtttcttgtcagttctt

SEQ ID NO: 25 - RNA, 25 nt, synthetic construct
  misc_feature 1..25: note = Description of Artificial Sequence: Synthetic oligonucleotide
  source 1..25: mol_type = other RNA
cagttgcgcagtttcttgtcagttc

SEQ ID NO: 26 - RNA, 27 nt, synthetic construct
  modified_base 26..27: mod_base = OTHER; note = thymine
  misc_feature 1..27: note = Description of Artificial Sequence: Synthetic oligonucleotide
  source 1..27: mol_type = other RNA
cagttgcgcagtttcttgtcagttctt

SEQ ID NO: 27 - RNA, 25 nt, synthetic construct
  misc_feature 1..25: note = Description of Artificial Sequence: Synthetic oligonucleotide
  source 1..25: mol_type = other RNA
cagttgcgcagtttcttgtcagttc

SEQ ID NO: 28 - RNA, 27 nt, synthetic construct
  modified_base 26..27: mod_base = OTHER; note = thymine
  misc_feature 1..27: note = Description of Artificial Sequence: Synthetic oligonucleotide
  source 1..27: mol_type = other RNA
cagttgcgcagtttcttgtcagttctt

SEQ ID NO: 29 - RNA, 25 nt, synthetic construct
  misc_feature 1..25: note = Description of Artificial Sequence: Synthetic oligonucleotide
  source 1..25: mol_type = other RNA
cagttgcgcagtttcttgtcagttc

SEQ ID NO: 30 - RNA, 27 nt, synthetic construct
  modified_base 26..27: mod_base = OTHER; note = thymine
  misc_feature 1..27: note = Description of Artificial Sequence: Synthetic oligonucleotide
  source 1..27: mol_type = other RNA
cagttgcgcagtttcttgtcagttctt

SEQ ID NO: 31 - RNA, 27 nt, synthetic construct
  modified_base 26..27: mod_base = OTHER; note = thymine
  misc_feature 1..27: note = Description of Artificial Sequence: Synthetic oligonucleotide
  source 1..27: mol_type = other RNA
cagttgcgcagtttcttgtcagttctt

SEQ ID NO: 32 - RNA, 27 nt, synthetic construct
  modified_base 26..27: mod_base = OTHER; note = thymine
  misc_feature 1..27: note = Description of Artificial Sequence: Synthetic oligonucleotide
  source 1..27: mol_type = other RNA
cagttgcgcagtttcttgtcagttctt

SEQ ID NO: 33 - RNA, 23 nt, synthetic construct
  misc_feature 1..23: note = Description of Artificial Sequence: Synthetic oligonucleotide
  source 1..23: mol_type = other RNA
cagttgcgcagtttcttgtcagt

SEQ ID NO: 34 - RNA, 23 nt, synthetic construct
  misc_feature 1..23: note = Description of Artificial Sequence: Synthetic oligonucleotide
  source 1..23: mol_type = other RNA
cagttgcgcagtttcttgtcagt

SEQ ID NO: 35 - RNA, 23 nt, synthetic construct
  modified_base 22..23: mod_base = OTHER; note = thymine
  misc_feature 1..23: note = Description of Artificial Sequence: Synthetic oligonucleotide
  source 1..23: mol_type = other RNA
atgcagtcatcgctcagcgtgtt

SEQ ID NO: 36 - RNA, 23 nt, synthetic construct
  modified_base 22..23: mod_base = OTHER; note = thymine
  misc_feature 1..23: note = Description of Artificial Sequence: Synthetic oligonucleotide
  source 1..23: mol_type = other RNA
aatgcagtcatcgctcagcgttt

SEQ ID NO: 37 - RNA, 23 nt, synthetic construct
  modified_base 22..23: mod_base = OTHER; note = thymine
  misc_feature 1..23: note = Description of Artificial Sequence: Synthetic oligonucleotide
  source 1..23: mol_type = other RNA
tggaatgcagtcatcgctcagtt

SEQ ID NO: 38 - RNA, 23 nt, synthetic construct
  modified_base 22..23: mod_base = OTHER; note = thymine
  misc_feature 1..23: note = Description of Artificial Sequence: Synthetic oligonucleotide
  source 1..23: mol_type = other RNA
agtggaatgcagtcatcgctctt

SEQ ID NO: 39 - RNA, 23 nt, synthetic construct
  modified_base 22..23: mod_base = OTHER; note = thymine
  misc_feature 1..23: note = Description of Artificial Sequence: Synthetic oligonucleotide
  source 1..23: mol_type = other RNA
acagtctgggtggccgtcgcatt

SEQ ID NO: 40 - RNA, 23 nt, synthetic construct
  modified_base 22..23: mod_base = OTHER; note = thymine
  misc_feature 1..23: note = Description of Artificial Sequence: Synthetic oligonucleotide
  source 1..23: mol_type = other RNA
attggttccacagccgagctctt

SEQ ID NO: 41 - RNA, 23 nt, synthetic construct
  modified_base 22..23: mod_base = OTHER; note = thymine
  misc_feature 1..23: note = Description of Artificial Sequence: Synthetic oligonucleotide
  source 1..23: mol_type = other RNA
tctcattggttccacagccgatt

SEQ ID NO: 42 - RNA, 23 nt, synthetic construct
  modified_base 22..23: mod_base = OTHER; note = thymine
  misc_feature 1..23: note = Description of Artificial Sequence: Synthetic oligonucleotide
  source 1..23: mol_type = other RNA
atctcattggttccacagccgtt

SEQ ID NO: 43 - RNA, 23 nt, synthetic construct
  modified_base 22..23: mod_base = OTHER; note = thymine
  misc_feature 1..23: note = Description of Artificial Sequence: Synthetic oligonucleotide
  source 1..23: mol_type = other RNA
aggatctcattggttccacagtt

SEQ ID NO: 44 - RNA, 23 nt, synthetic construct
  modified_base 22..23: mod_base = OTHER; note = thymine
  misc_feature 1..23: note = Description of Artificial Sequence: Synthetic oligonucleotide
  source 1..23: mol_type = other RNA
tgagagaggtgacactctccatt

SEQ ID NO: 45 - RNA, 23 nt, synthetic construct
  modified_base 22..23: mod_base = OTHER; note = thymine
  misc_feature 1..23: note = Description of Artificial Sequence: Synthetic oligonucleotide
  source 1..23: mol_type = other RNA
tggttgtggcattcctgagagtt

SEQ ID NO: 46 - RNA, 23 nt, synthetic construct
  modified_base 22..23: mod_base = OTHER; note = thymine
  misc_feature 1..23: note = Description of Artificial Sequence: Synthetic oligonucleotide
  source 1..23: mol_type = other RNA
tggcattcccgacagaggggatt

SEQ ID NO: 47 - RNA, 23 nt, synthetic construct
  modified_base 22..23: mod_base = OTHER; note = thymine
  misc_feature 1..23: note = Description of Artificial Sequence: Synthetic oligonucleotide
  source 1..23: mol_type = other RNA
aggatgtggcattcccgacagtt

SEQ ID NO: 48 - RNA, 23 nt, synthetic construct
  modified_base 22..23: mod_base = OTHER; note = thymine
  misc_feature 1..23: note = Description of Artificial Sequence: Synthetic oligonucleotide
  source 1..23: mol_type = other RNA
ttccagactggtctccggcagtt

SEQ ID NO: 49 - RNA, 23 nt, synthetic construct
  modified_base 22..23: mod_base = OTHER; note = thymine
  misc_feature 1..23: note = Description of Artificial Sequence: Synthetic oligonucleotide
  source 1..23: mol_type = other RNA
ataaccccataggcagttgggtt

SEQ ID NO: 50 - RNA, 23 nt, synthetic construct
  modified_base 22..23: mod_base = OTHER; note = thymine
  misc_feature 1..23: note = Description of Artificial Sequence: Synthetic oligonucleotide
  source 1..23: mol_type = other RNA
ttgcactgagcaccgcagcagtt

SEQ ID NO: 51 - RNA, 23 nt, synthetic construct
  modified_base 22..23: mod_base = OTHER; note = thymine
  misc_feature 1..23: note = Description of Artificial Sequence: Synthetic oligonucleotide
  source 1..23: mol_type = other RNA
aaaaggaggagggtggcggtgtt

SEQ ID NO: 52 - RNA, 23 nt, synthetic construct
  modified_base 22..23: mod_base = OTHER; note = thymine
  misc_feature 1..23: note = Description of Artificial Sequence: Synthetic oligonucleotide
  source 1..23: mol_type = other RNA
acaaaaggaggagggtggcggtt

SEQ ID NO: 53 - RNA, 23 nt, synthetic construct
  modified_base 22..23: mod_base = OTHER; note = thymine
  misc_feature 1..23: note = Description of Artificial Sequence: Synthetic oligonucleotide
  source 1..23: mol_type = other RNA
accagtaaccccagtgggcggtt

SEQ ID NO: 54 - RNA, 23 nt, synthetic construct
  modified_base 22..23: mod_base = OTHER; note = thymine
  misc_feature 1..23: note = Description of Artificial Sequence: Synthetic oligonucleotide
  source 1..23: mol_type = other RNA
ttcatggccaccagtaacccctt

SEQ ID NO: 55 - RNA, 23 nt, synthetic construct
  modified_base 22..23: mod_base = OTHER; note = thymine
  misc_feature 1..23: note = Description of Artificial Sequence: Synthetic oligonucleotide
  source 1..23: mol_type = other RNA
actccttcatggccaccagtatt

SEQ ID NO: 56 - RNA, 23 nt, synthetic construct
  modified_base 22..23: mod_base = OTHER; note = thymine
  misc_feature 1..23: note = Description of Artificial Sequence: Synthetic oligonucleotide
  source 1..23: mol_type = other RNA
ttctgacagcagcagggactctt

SEQ ID NO: 57 - RNA, 23 nt, synthetic construct
  modified_base 22..23: mod_base = OTHER; note = thymine
  misc_feature 1..23: note = Description of Artificial Sequence: Synthetic oligonucleotide
  source 1..23: mol_type = other RNA
tctgttctgacagcagcagggtt

SEQ ID NO: 58 - RNA, 23 nt, synthetic construct
  modified_base 22..23: mod_base = OTHER; note = thymine
  misc_feature 1..23: note = Description of Artificial Sequence: Synthetic oligonucleotide
  source 1..23: mol_type = other RNA
tcttctgttctgacagcagcatt

SEQ ID NO: 59 - RNA, 23 nt, synthetic construct
  modified_base 22..23: mod_base = OTHER; note = thymine
  misc_feature 1..23: note = Description of Artificial Sequence: Synthetic oligonucleotide
  source 1..23: mol_type = other RNA
aggtcttctgttctgacagcatt

SEQ ID NO: 60 - RNA, 23 nt, synthetic construct
  modified_base 22..23: mod_base = OTHER; note = thymine
  misc_feature 1..23: note = Description of Artificial Sequence: Synthetic oligonucleotide
  source 1..23: mol_type = other RNA
ttgtcctcagggcagcgaggttt

SEQ ID NO: 61 - RNA, 23 nt, synthetic construct
  modified_base 22..23: mod_base = OTHER; note = thymine
  misc_feature 1..23: note = Description of Artificial Sequence: Synthetic oligonucleotide
  source 1..23: mol_type = other RNA
aagtgcttgtcctcagggcagtt

SEQ ID NO: 62 - RNA, 23 nt, synthetic construct
  modified_base 22..23: mod_base = OTHER; note = thymine
  misc_feature 1..23: note = Description of Artificial Sequence: Synthetic oligonucleotide
  source 1..23: mol_type = other RNA
tacccatccgcatcactgctctt

SEQ ID NO: 63 - RNA, 23 nt, synthetic construct
  modified_base 22..23: mod_base = OTHER; note = thymine
  misc_feature 1..23: note = Description of Artificial Sequence: Synthetic oligonucleotide
  source 1..23: mol_type = other RNA
tctctgagggctggtgtgccctt

SEQ ID NO: 64 - RNA, 23 nt, synthetic construct
  modified_base 22..23: mod_base = OTHER; note = thymine
  misc_feature 1..23: note = Description of Artificial Sequence: Synthetic oligonucleotide
  source 1..23: mol_type = other RNA
aagagctcaggtctctgagggtt

SEQ ID NO: 65 - RNA, 23 nt, synthetic construct
  modified_base 22..23: mod_base = OTHER; note = thymine
  misc_feature 1..23: note = Description of Artificial Sequence: Synthetic oligonucleotide
  source 1..23: mol_type = other RNA
aagagctcaggtctctgagggtt

SEQ ID NO: 66 - RNA, 23 nt, synthetic construct
  modified_base 22..23: mod_base = OTHER; note = thymine
  misc_feature 1..23: note = Description of Artificial Sequence: Synthetic oligonucleotide
  source 1..23: mol_type = other RNA
aagagctcaggtctctgagggtt

SEQ ID NO: 67 - RNA, 23 nt, synthetic construct
  modified_base 22..23: mod_base = OTHER; note = thymine
  misc_feature 1..23: note = Description of Artificial Sequence: Synthetic oligonucleotide
  source 1..23: mol_type = other RNA
aagagctcaggtctctgagggtt

SEQ ID NO: 68 - RNA, 21 nt, synthetic construct
  misc_feature 1..21: note = Description of Artificial Sequence: Synthetic oligonucleotide
  source 1..21: mol_type = other RNA
aagagctcaggtctctgaggg

SEQ ID NO: 69 - RNA, 21 nt, synthetic construct
  misc_feature 1..21: note = Description of Artificial Sequence: Synthetic oligonucleotide
  source 1..21: mol_type = other RNA
aagagctcaggtctctgaggg

SEQ ID NO: 70 - RNA, 23 nt, synthetic construct
  modified_base 22..23: mod_base = OTHER; note = thymine
  misc_feature 1..23: note = Description of Artificial Sequence: Synthetic oligonucleotide
  source 1..23: mol_type = other RNA
aagagctcaggtctctgagggtt

SEQ ID NO: 71 - RNA, 23 nt, synthetic construct
  modified_base 22..23: mod_base = OTHER; note = thymine
  misc_feature 1..23: note = Description of Artificial Sequence: Synthetic oligonucleotide
  source 1..23: mol_type = other RNA
aagagctcaggtctctgagggtt

SEQ ID NO: 72 - RNA, 21 nt, synthetic construct
  misc_feature 1..21: note = Description of Artificial Sequence: Synthetic oligonucleotide
  source 1..21: mol_type = other RNA
aagagctcaggtctctgaggg

SEQ ID NO: 73 - RNA, 23 nt, synthetic construct
  modified_base 22..23: mod_base = OTHER; note = thymine
  misc_feature 1..23: note = Description of Artificial Sequence: Synthetic oligonucleotide
  source 1..23: mol_type = other RNA
aagagctcaggtctctgagggtt

SEQ ID NO: 74 - RNA, 21 nt, synthetic construct
  misc_feature 1..21: note = Description of Artificial Sequence: Synthetic oligonucleotide
  source 1..21: mol_type = other RNA
aagagctcaggtctctgaggg

SEQ ID NO: 75 - RNA, 23 nt, synthetic construct
  modified_base 22..23: mod_base = OTHER; note = thymine
  misc_feature 1..23: note = Description of Artificial Sequence: Synthetic oligonucleotide
  source 1..23: mol_type = other RNA
aagagctcaggtctctgagggtt

SEQ ID NO: 76 - RNA, 21 nt, synthetic construct
  misc_feature 1..21: note = Description of Artificial Sequence: Synthetic oligonucleotide
  source 1..21: mol_type = other RNA
aagagctcaggtctctgaggg

SEQ ID NO: 77 - RNA, 21 nt, synthetic construct
  misc_feature 1..21: note = Description of Artificial Sequence: Synthetic oligonucleotide
  source 1..21: mol_type = other RNA
aagagctcaggtctctgaggg

SEQ ID NO: 78 - RNA, 23 nt, synthetic construct
  modified_base 22..23: mod_base = OTHER; note = thymine
  misc_feature 1..23: note = Description of Artificial Sequence: Synthetic oligonucleotide
  source 1..23: mol_type = other RNA
aagagctcaggtctctgagggtt

SEQ ID NO: 79 - RNA, 23 nt, synthetic construct
  modified_base 22..23: mod_base = OTHER; note = thymine
  misc_feature 1..23: note = Description of Artificial Sequence: Synthetic oligonucleotide
  source 1..23: mol_type = other RNA
aagagctcaggtctctgagggtt

SEQ ID NO: 80 - RNA, 23 nt, synthetic construct
  modified_base 22..23: mod_base = OTHER; note = thymine
  misc_feature 1..23: note = Description of Artificial Sequence: Synthetic oligonucleotide
  source 1..23: mol_type = other RNA
aagagctcaggtctctgagggtt

SEQ ID NO: 81 - RNA, 21 nt, synthetic construct
  misc_feature 1..21: note = Description of Artificial Sequence: Synthetic oligonucleotide
  source 1..21: mol_type = other RNA
aagagctcaggtctctgaggg

SEQ ID NO: 82 - RNA, 23 nt, synthetic construct
  modified_base 22..23: mod_base = OTHER; note = thymine
  misc_feature 1..23: note = Description of Artificial Sequence: Synthetic oligonucleotide
  source 1..23: mol_type = other RNA
aagagctcaggtctctgagggtt

SEQ ID NO: 83 - RNA, 23 nt, synthetic construct
  modified_base 22..23: mod_base = OTHER; note = thymine
  misc_feature 1..23: note = Description of Artificial Sequence: Synthetic oligonucleotide
  source 1..23: mol_type = other RNA
agaagagctcaggtctctgagtt

SEQ ID NO: 84 - RNA, 23 nt, synthetic construct
  modified_base 22..23: mod_base = OTHER; note = thymine
  misc_feature 1..23: note = Description of Artificial Sequence: Synthetic oligonucleotide
  source 1..23: mol_type = other RNA
atagggagtgtccagggaccctt

SEQ ID NO: 85 - RNA, 23 nt, synthetic construct
  modified_base 22..23: mod_base = OTHER; note = thymine
  misc_feature 1..23: note = Description of Artificial Sequence: Synthetic oligonucleotide
  source 1..23: mol_type = other RNA
tccatagggagtgtccagggatt

SEQ ID NO: 86 - RNA, 23 nt, synthetic construct
  modified_base 22..23: mod_base = OTHER; note = thymine
  misc_feature 1..23: note = Description of Artificial Sequence: Synthetic oligonucleotide
  source 1..23: mol_type = other RNA
atctccatagggagtgtccagtt

SEQ ID NO: 87 - RNA, 23 nt, synthetic construct
  modified_base 22..23: mod_base = OTHER; note = thymine
  misc_feature 1..23: note = Description of Artificial Sequence: Synthetic oligonucleotide
  source 1..23: mol_type = other RNA
tcagttctggctgtggcaggttt

SEQ ID NO: 88 - RNA, 23 nt, synthetic construct
  modified_base 22..23: mod_base = OTHER; note = thymine
  misc_feature 1..23: note = Description of Artificial Sequence: Synthetic oligonucleotide
  source 1..23: mol_type = other RNA
ttctaccccctgggagctgcctt

SEQ ID NO: 89 - RNA, 23 nt, synthetic construct
  modified_base 22..23: mod_base = OTHER; note = thymine
  misc_feature 1..23: note = Description of Artificial Sequence: Synthetic oligonucleotide
  source 1..23: mol_type = other RNA
aagcacagggccgttctaccctt

SEQ ID NO: 90 - RNA, 23 nt, synthetic construct
  modified_base 22..23: mod_base = OTHER; note = thymine
  misc_feature 1..23: note = Description of Artificial Sequence: Synthetic oligonucleotide
  source 1..23: mol_type = other RNA
tgtcttaagcacagggccgtttt

SEQ ID NO: 91 - RNA, 23 nt, synthetic construct
  modified_base 22..23: mod_base = OTHER; note = thymine
  misc_feature 1..23: note = Description of Artificial Sequence: Synthetic oligonucleotide
  source 1..23: mol_type = other RNA
agtgtcttaagcacagggccgtt

SEQ ID NO: 92 - RNA, 23 nt, synthetic construct
  modified_base 22..23: mod_base = OTHER; note = thymine
  misc_feature 1..23: note = Description of Artificial Sequence: Synthetic oligonucleotide
  source 1..23: mol_type = other RNA
ttttttgaggatgtgaagcaatt

SEQ ID NO: 93 - RNA, 23 nt, synthetic construct
  modified_base 22..23: mod_base = OTHER; note = thymine
  misc_feature 1..23: note = Description of Artificial Sequence: Synthetic oligonucleotide
  source 1..23: mol_type = other RNA
tttttttgaggatgtgaagcatt

SEQ ID NO: 94 - RNA, 23 nt, synthetic construct
  modified_base 22..23: mod_base = OTHER; note = thymine
  misc_feature 1..23: note = Description of Artificial Sequence: Synthetic oligonucleotide
  source 1..23: mol_type = other RNA
tgcgcgtgcgcagggataagatt

SEQ ID NO: 95 - RNA, 23 nt, synthetic construct
  modified_base 22..23: mod_base = OTHER; note = thymine
  misc_feature 1..23: note = Description of Artificial Sequence: Synthetic oligonucleotide
  source 1..23: mol_type = other RNA
cgcgtgcgcagggataagagatt

SEQ ID NO: 96 - RNA, 23 nt, synthetic construct
  modified_base 22..23: mod_base = OTHER; note = thymine
  misc_feature 1..23: note = Description of Artificial Sequence: Synthetic oligonucleotide
  source 1..23: mol_type = other RNA
gcgccgctgtggggacagcattt

SEQ ID NO: 97 - RNA, 23 nt, synthetic construct
  modified_base 22..23: mod_base = OTHER; note = thymine
  misc_feature 1..23: note = Description of Artificial Sequence: Synthetic oligonucleotide
  source 1..23: mol_type = other RNA
cagcatgagcggcggttggattt

SEQ ID NO: 98 - RNA, 23 nt, synthetic construct
  modified_base 22..23: mod_base = OTHER; note = thymine
  misc_feature 1..23: note = Description of Artificial Sequence: Synthetic oligonucleotide
  source 1..23: mol_type = other RNA
ccgccgcgagcccgctttccatt

SEQ ID NO: 99 - RNA, 23 nt, synthetic construct
  modified_base 22..23: mod_base = OTHER; note = thymine
  misc_feature 1..23: note = Description of Artificial Sequence: Synthetic oligonucleotide
  source 1..23: mol_type = other RNA
ctcgtgcccacccaccaagtttt

SEQ ID NO: 100 - RNA, 23 nt, synthetic construct
  modified_base 22..23: mod_base = OTHER; note = thymine
  misc_feature 1..23: note = Description of Artificial Sequence: Synthetic oligonucleotide
  source 1..23: mol_type = other RNA
gtgcccacccaccaagttccatt

SEQ ID NO: 101 - RNA, 23 nt, synthetic construct
  modified_base 22..23: mod_base = OTHER; note = thymine
  misc_feature 1..23: note = Description of Artificial Sequence: Synthetic oligonucleotide
  source 1..23: mol_type = other RNA
gcccacccaccaagttccagttt

SEQ ID NO: 102 - RNA, 23 nt, synthetic construct
  modified_base 22..23: mod_base = OTHER; note = thymine
  misc_feature 1..23: note = Description of Artificial Sequence: Synthetic oligonucleotide
  source 1..23: mol_type = other RNA
cagtgccgcaccagtggcttatt

SEQ ID NO: 103 - RNA, 23 nt, synthetic construct
  modified_base 22..23: mod_base = OTHER; note = thymine
  misc_feature 1..23: note = Description of Artificial Sequence: Synthetic oligonucleotide
  source 1..23: mol_type = other RNA
ccgcaccagtggcttatgcgttt

SEQ ID NO: 104 - RNA, 23 nt, synthetic construct
  modified_base 22..23: mod_base = OTHER; note = thymine
  misc_feature 1..23: note = Description of Artificial Sequence: Synthetic oligonucleotide
  source 1..23: mol_type = other RNA
gcgctgcgacagggacttggatt

SEQ ID NO: 105 - RNA, 23 nt, synthetic construct
  modified_base 22..23: mod_base = OTHER; note = thymine
  misc_feature 1..23: note = Description of Artificial Sequence: Synthetic oligonucleotide
  source 1..23: mol_type = other RNA
cagcgatggcagcgatgaggatt

SEQ ID NO: 106 - RNA, 23 nt, synthetic construct
  modified_base 22..23: mod_base = OTHER; note = thymine
  misc_feature 1..23: note = Description of Artificial Sequence: Synthetic oligonucleotide
  source 1..23: mol_type = other RNA
cccctgcaccggcgtcagtgatt

SEQ ID NO: 107 - RNA, 23 nt, synthetic construct
  modified_base 22..23: mod_base = OTHER; note = thymine
  misc_feature 1..23: note = Description of Artificial Sequence: Synthetic oligonucleotide
  source 1..23: mol_type = other RNA
ctgctctgggggaactgacaatt

SEQ ID NO: 108 - RNA, 23 nt, synthetic construct
  modified_base 22..23: mod_base = OTHER; note = thymine
  misc_feature 1..23: note = Description of Artificial Sequence: Synthetic oligonucleotide
  source 1..23: mol_type = other RNA
ctctgggggaactgacaagaatt

SEQ ID NO: 109 - RNA, 23 nt, synthetic construct
  modified_base 22..23: mod_base = OTHER; note = thymine
  misc_feature 1..23: note = Description of Artificial Sequence: Synthetic oligonucleotide
  source 1..23: mol_type = other RNA
tgggggaactgacaagaaacttt

SEQ ID NO: 110 - RNA, 27 nt, synthetic construct
  modified_base 26..27: mod_base = OTHER; note = thymine
  misc_feature 1..27: note = Description of Artificial Sequence: Synthetic oligonucleotide
  source 1..27: mol_type = other RNA
gaactgacaagaaactgcgcaactgtt

SEQ ID NO: 111 - RNA, 27 nt, synthetic construct
  modified_base 26..27: mod_base = OTHER; note = thymine
  misc_feature 1..27: note = Description of Artificial Sequence: Synthetic oligonucleotide
  source 1..27: mol_type = other RNA
gaactgacaagaaactgcgcaactgtt

SEQ ID NO: 112 - RNA, 27 nt, synthetic construct
  modified_base 26..27: mod_base = OTHER; note = thymine
  misc_feature 1..27: note = Description of Artificial Sequence: Synthetic oligonucleotide
  source 1..27: mol_type = other RNA
gaactgacaagaaactgcgcaactgtt

SEQ ID NO: 113 - RNA, 25 nt, synthetic construct
  misc_feature 1..25: note = Description of Artificial Sequence: Synthetic oligonucleotide
  source 1..25: mol_type = other RNA
gaactgacaagaaactgcgcaactg

SEQ ID NO: 114 - RNA, 27 nt, synthetic construct
  modified_base 26..27: mod_base = OTHER; note = thymine
  misc_feature 1..27: note = Description of Artificial Sequence: Synthetic oligonucleotide
  source 1..27: mol_type = other RNA
gaactgacaagaaactgcgcaactgtt

SEQ ID NO: 115 - RNA, 25 nt, synthetic construct
  misc_feature 1..25: note = Description of Artificial Sequence: Synthetic oligonucleotide
  source 1..25: mol_type = other RNA
gaactgacaagaaactgcgcaactg

SEQ ID NO: 116 - RNA, 27 nt, synthetic construct
  modified_base 26..27: mod_base = OTHER; note = thymine
  misc_feature 1..27: note = Description of Artificial Sequence: Synthetic oligonucleotide
  source 1..27: mol_type = other RNA
gaactgacaagaaactgcgcaactgtt

SEQ ID NO: 117 - RNA, 27 nt, synthetic construct
  modified_base 26..27: mod_base = OTHER; note = thymine
  misc_feature 1..27: note = Description of Artificial Sequence: Synthetic oligonucleotide
  source 1..27: mol_type = other RNA
gaactgacaagaaactgcgcaactgtt

SEQ ID NO: 118 - RNA, 27 nt, synthetic construct
  modified_base 26..27: mod_base = OTHER; note = thymine
  misc_feature 1..27: note = Description of Artificial Sequence: Synthetic oligonucleotide
  source 1..27: mol_type = other RNA
gaactgacaagaaactgcgcaactgtt

SEQ ID NO: 119 - RNA, 25 nt, synthetic construct
  misc_feature 1..25: note = Description of Artificial Sequence: Synthetic oligonucleotide
  source 1..25: mol_type = other RNA
gaactgacaagaaactgcgcaactg

SEQ ID NO: 120 - RNA, 25 nt, synthetic construct
  misc_feature 1..25: note = Description of Artificial Sequence: Synthetic oligonucleotide
  source 1..25: mol_type = other RNA
gaactgacaagaaactgcgcaactg

SEQ ID NO: 121 - RNA, 27 nt, synthetic construct
  modified_base 26..27: mod_base = OTHER; note = thymine
  misc_feature 1..27: note = Description of Artificial Sequence: Synthetic oligonucleotide
  source 1..27: mol_type = other RNA
gaactgacaagaaactgcgcaactgtt

SEQ ID NO: 122 - RNA, 25 nt, synthetic construct
  misc_feature 1..25: note = Description of Artificial Sequence: Synthetic oligonucleotide
  source 1..25: mol_type = other RNA
gaactgacaagaaactgcgcaactg

SEQ ID NO: 123 - RNA, 23 nt, synthetic construct
  modified_base 22..23: mod_base = OTHER; note = thymine
  misc_feature 1..23: note = Description of Artificial Sequence: Synthetic oligonucleotide
  source 1..23: mol_type = other RNA
tgacaagaaactgcgcaactgtt

SEQ ID NO: 124 - RNA, 17 nt, synthetic construct
  modified_base 16..17: mod_base = OTHER; note = thymine
  misc_feature 1..17: note = Description of Artificial Sequence: Synthetic oligonucleotide
  source 1..17: mol_type = other RNA
gaaactgcgcaactgtt

SEQ ID NO: 125 - RNA, 17 nt, synthetic construct
  modified_base 16..17: mod_base = OTHER; note = thymine
  misc_feature 1..17: note = Description of Artificial Sequence: Synthetic oligonucleotide
  source 1..17: mol_type = other RNA
gaaactgcgcaactgtt

SEQ ID NO: 126 - RNA, 15 nt, synthetic construct
  misc_feature 1..15: note = Description of Artificial Sequence: Synthetic oligonucleotide
  source 1..15: mol_type = other RNA
gaaactgcgcaactg

SEQ ID NO: 127 - RNA, 15 nt, synthetic construct
  misc_feature 1..15: note = Description of Artificial Sequence: Synthetic oligonucleotide
  source 1..15: mol_type = other RNA
gaaactgcgcaactg

SEQ ID NO: 128 - RNA, 23 nt, synthetic construct
  modified_base 22..23: mod_base = OTHER; note = thymine
  misc_feature 1..23: note = Description of Artificial Sequence: Synthetic oligonucleotide
  source 1..23: mol_type = other RNA
cacgctgagcgatgactgcattt

SEQ ID NO: 129 - RNA, 23 nt, synthetic construct
  modified_base 22..23: mod_base = OTHER; note = thymine
  misc_feature 1..23: note = Description of Artificial Sequence: Synthetic oligonucleotide
  source 1..23: mol_type = other RNA
acgctgagcgatgactgcatttt

SEQ ID NO: 130 - RNA, 23 nt, synthetic construct
  modified_base 22..23: mod_base = OTHER; note = thymine
  misc_feature 1..23: note = Description of Artificial Sequence: Synthetic oligonucleotide
  source 1..23: mol_type = other RNA
ctgagcgatgactgcattccatt

SEQ ID NO: 131 - RNA, 23 nt, synthetic construct
  modified_base 22..23: mod_base = OTHER; note = thymine
  misc_feature 1..23: note = Description of Artificial Sequence: Synthetic oligonucleotide
  source 1..23: mol_type = other RNA
gagcgatgactgcattccacttt

SEQ ID NO: 132 - RNA, 23 nt, synthetic construct
  modified_base 22..23: mod_base = OTHER; note = thymine
  misc_feature 1..23: note = Description of Artificial Sequence: Synthetic oligonucleotide
  source 1..23: mol_type = other RNA
tgcgacggccacccagactgttt

SEQ ID NO: 133 - RNA, 23 nt, synthetic construct
  modified_base 22..23: mod_base = OTHER; note = thymine
  misc_feature 1..23: note = Description of Artificial Sequence: Synthetic oligonucleotide
  source 1..23: mol_type = other RNA
gagctcggctgtggaaccaattt

SEQ ID NO: 134 - RNA, 23 nt, synthetic construct
  modified_base 22..23: mod_base = OTHER; note = thymine
  misc_feature 1..23: note = Description of Artificial Sequence: Synthetic oligonucleotide
  source 1..23: mol_type = other RNA
tcggctgtggaaccaatgagatt

SEQ ID NO: 135 - RNA, 23 nt, synthetic construct
  modified_base 22..23: mod_base = OTHER; note = thymine
  misc_feature 1..23: note = Description of Artificial Sequence: Synthetic oligonucleotide
  source 1..23: mol_type = other RNA
cggctgtggaaccaatgagattt

SEQ ID NO: 136 - RNA, 23 nt, synthetic construct
  modified_base 22..23: mod_base = OTHER; note = thymine
  misc_feature 1..23: note = Description of Artificial Sequence: Synthetic oligonucleotide
  source 1..23: mol_type = other RNA
ctgtggaaccaatgagatccttt

SEQ ID NO: 137 - RNA, 23 nt, synthetic construct
  modified_base 22..23: mod_base = OTHER; note = thymine
  misc_feature 1..23: note = Description of Artificial Sequence: Synthetic oligonucleotide
  source 1..23: mol_type = other RNA
tggagagtgtcacctctctcatt

SEQ ID NO: 138 - RNA, 23 nt, synthetic construct
  modified_base 22..23: mod_base = OTHER; note = thymine
  misc_feature 1..23: note = Description of Artificial Sequence: Synthetic oligonucleotide
  source 1..23: mol_type = other RNA
ctctcaggaatgccacaaccatt

SEQ ID NO: 139 - RNA, 23 nt, synthetic construct
  modified_base 22..23: mod_base = OTHER; note = thymine
  misc_feature 1..23: note = Description of Artificial Sequence: Synthetic oligonucleotide
  source 1..23: mol_type = other RNA
tcccctctgtcgggaatgccatt

SEQ ID NO: 140 - RNA, 23 nt, synthetic construct
  modified_base 22..23: mod_base = OTHER; note = thymine
  misc_feature 1..23: note = Description of Artificial Sequence: Synthetic oligonucleotide
  source 1..23: mol_type = other RNA
ctgtcgggaatgccacatccttt

SEQ ID NO: 141 - RNA, 23 nt, synthetic construct
  modified_base 22..23: mod_base = OTHER; note = thymine
  misc_feature 1..23: note = Description of Artificial Sequence: Synthetic oligonucleotide
  source 1..23: mol_type = other RNA
ctgccggagaccagtctggaatt

SEQ ID NO: 142 - RNA, 23 nt, synthetic construct
  modified_base 22..23: mod_base = OTHER; note = thymine
  misc_feature 1..23: note = Description of Artificial Sequence: Synthetic oligonucleotide
  source 1..23: mol_type = other RNA
cccaactgcctatggggttattt

SEQ ID NO: 143 - RNA, 23 nt, synthetic construct
  modified_base 22..23: mod_base = OTHER; note = thymine
  misc_feature 1..23: note = Description of Artificial Sequence: Synthetic oligonucleotide
  source 1..23: mol_type = other RNA
ctgctgcggtgctcagtgcaatt

SEQ ID NO: 144 - RNA, 23 nt, synthetic construct
  modified_base 22..23: mod_base = OTHER; note = thymine
  misc_feature 1..23: note = Description of Artificial Sequence: Synthetic oligonucleotide
  source 1..23: mol_type = other RNA
caccgccaccctcctcctttttt

SEQ ID NO: 145 - RNA, 23 nt, synthetic construct
  modified_base 22..23: mod_base = OTHER; note = thymine
  misc_feature 1..23: note = Description of Artificial Sequence: Synthetic oligonucleotide
  source 1..23: mol_type = other RNA
ccgccaccctcctccttttgttt

SEQ ID NO: 146 - RNA, 23 nt, synthetic construct
  modified_base 22..23: mod_base = OTHER; note = thymine
  misc_feature 1..23: note = Description of Artificial Sequence: Synthetic oligonucleotide
  source 1..23: mol_type = other RNA
ccgcccactggggttactggttt

SEQ ID NO: 147 - RNA, 23 nt, synthetic construct
  modified_base 22..23: mod_base = OTHER; note = thymine
  misc_feature 1..23: note = Description of Artificial Sequence: Synthetic oligonucleotide
  source 1..23: mol_type = other RNA
ggggttactggtggccatgaatt

SEQ ID NO: 148 - RNA, 23 nt, synthetic construct
  modified_base 22..23: mod_base = OTHER; note = thymine
  misc_feature 1..23: note = Description of Artificial Sequence: Synthetic oligonucleotide
  source 1..23: mol_type = other RNA
tactggtggccatgaaggagttt

SEQ ID NO: 149 - RNA, 23 nt, synthetic construct
  modified_base 22..23: mod_base = OTHER; note = thymine
  misc_feature 1..23: note = Description of Artificial Sequence: Synthetic oligonucleotide
  source 1..23: mol_type = other RNA
gagtccctgctgctgtcagaatt

SEQ ID NO: 150 - RNA, 23 nt, synthetic construct
  modified_base 22..23: mod_base = OTHER; note = thymine
  misc_feature 1..23: note = Description of Artificial Sequence: Synthetic oligonucleotide
  source 1..23: mol_type = other RNA
ggctgctgctgtcagaacagatt

SEQ ID NO: 151 - RNA, 23 nt, synthetic construct
  modified_base 22..23: mod_base = OTHER; note = thymine
  misc_feature 1..23: note = Description of Artificial Sequence: Synthetic oligonucleotide
  source 1..23: mol_type = other RNA
tgctgctgtcagaacagaagatt

SEQ ID NO: 152 - RNA, 23 nt, synthetic construct
  modified_base 22..23: mod_base = OTHER; note = thymine
  misc_feature 1..23: note = Description of Artificial Sequence: Synthetic oligonucleotide
  source 1..23: mol_type = other RNA
tgctgtcagaacagaagaccttt

SEQ ID NO: 153 - RNA, 23 nt, synthetic construct
  modified_base 22..23: mod_base = OTHER; note = thymine
  misc_feature 1..23: note = Description of Artificial Sequence: Synthetic oligonucleotide
  source 1..23: mol_type = other RNA
acctcgctgccctgaggacaatt

SEQ ID NO: 154 - RNA, 23 nt, synthetic construct
  modified_base 22..23: mod_base = OTHER; note = thymine
  misc_feature 1..23: note = Description of Artificial Sequence: Synthetic oligonucleotide
  source 1..23: mol_type = other RNA
ctgccctgaggacaagcactttt

SEQ ID NO: 155 - RNA, 23 nt, synthetic construct
  modified_base 22..23: mod_base = OTHER; note = thymine
  misc_feature 1..23: note = Description of Artificial Sequence: Synthetic oligonucleotide
  source 1..23: mol_type = other RNA
gagcagtgatgcggatgggtatt

SEQ ID NO: 156 - RNA, 23 nt, synthetic construct
  modified_base 22..23: mod_base = OTHER; note = thymine
  misc_feature 1..23: note = Description of Artificial Sequence: Synthetic oligonucleotide
  source 1..23: mol_type = other RNA
gggcacaccagccctcagagatt

SEQ ID NO: 157 - RNA, 23 nt, synthetic construct
  modified_base 22..23: mod_base = OTHER; note = thymine
  misc_feature 1..23: note = Description of Artificial Sequence: Synthetic oligonucleotide
  source 1..23: mol_type = other RNA
ccctcagagacctgagctctttt

SEQ ID NO: 158 - RNA, 23 nt, synthetic construct
  modified_base 22..23: mod_base = OTHER; note = thymine
  misc_feature 1..23: note = Description of Artificial Sequence: Synthetic oligonucleotide
  source 1..23: mol_type = other RNA
ccctcagagacctgagctctttt

SEQ ID NO: 159 - RNA, 23 nt, synthetic construct
  modified_base 22..23: mod_base = OTHER; note = thymine
  misc_feature 1..23: note = Description of Artificial Sequence: Synthetic oligonucleotide
  source 1..23: mol_type = other RNA
ccctcagagacctgagctctttt

SEQ ID NO: 160 - RNA, 21 nt, synthetic construct
  misc_feature 1..21: note = Description of Artificial Sequence: Synthetic oligonucleotide
  source 1..21: mol_type = other RNA
ccctcagagacctgagctctt

SEQ ID NO: 161 - RNA, 23 nt, synthetic construct
  modified_base 22..23: mod_base = OTHER; note = thymine
  misc_feature 1..23: note = Description of Artificial Sequence: Synthetic oligonucleotide
  source 1..23: mol_type = other RNA
ccctcagagacctgagctctttt

SEQ ID NO: 162 - RNA, 21 nt, synthetic construct
  misc_feature 1..21: note = Description of Artificial Sequence: Synthetic oligonucleotide
  source 1..21: mol_type = other RNA
ccctcagagacctgagctctt

SEQ ID NO: 163 - RNA, 23 nt, synthetic construct
  modified_base 22..23: mod_base = OTHER; note = thymine
  misc_feature 1..23: note = Description of Artificial Sequence: Synthetic oligonucleotide
  source 1..23: mol_type = other RNA
ccctcagagacctgagctctttt

SEQ ID NO: 164 - RNA, 23 nt, synthetic construct
  modified_base 22..23: mod_base = OTHER; note = thymine
  misc_feature 1..23: note = Description of Artificial Sequence: Synthetic oligonucleotide
  source 1..23: mol_type = other RNA
ccctcagagacctgagctctttt

SEQ ID NO: 165 - RNA, 23 nt, synthetic construct
  modified_base 22..23: mod_base = OTHER; note = thymine
  misc_feature 1..23: note = Description of Artificial Sequence: Synthetic oligonucleotide
  source 1..23: mol_type = other RNA
ccctcagagacctgagctctttt

SEQ ID NO: 166 - RNA, 21 nt, synthetic construct
  misc_feature 1..21: note = Description of Artificial Sequence: Synthetic oligonucleotide
  source 1..21: mol_type = other RNA
ccctcagagacctgagctctt

SEQ ID NO: 167 - RNA, 21 nt, synthetic construct
  misc_feature 1..21: note = Description of Artificial Sequence: Synthetic oligonucleotide
  source 1..21: mol_type = other RNA
ccctcagagacctgagctctt

SEQ ID NO: 168 - RNA, 23 nt, synthetic construct
  modified_base 22..23: mod_base = OTHER; note = thymine
  misc_feature 1..23: note = Description of Artificial Sequence: Synthetic oligonucleotide
  source 1..23: mol_type = other RNA
ccctcagagacctgagctctttt

SEQ ID NO: 169 - RNA, 21 nt, synthetic construct
  misc_feature 1..21: note = Description of Artificial Sequence: Synthetic oligonucleotide
  source 1..21: mol_type = other RNA
ccctcagagacctgagctctt

SEQ ID NO: 170 - RNA, 23 nt, synthetic construct
  modified_base 22..23: mod_base = OTHER; note = thymine
  misc_feature 1..23: note = Description of Artificial Sequence: Synthetic oligonucleotide
  source 1..23: mol_type = other RNA
ccctcagagacctgagctctttt

SEQ ID NO: 171 - RNA, 17 nt, synthetic construct
  modified_base 16..17: mod_base = OTHER; note = thymine
  misc_feature 1..17: note = Description of Artificial Sequence: Synthetic oligonucleotide
  source 1..17: mol_type = other RNA
gagacctgagctctttt

SEQ ID NO: 172 - RNA, 17 nt, synthetic construct
  modified_base 16..17: mod_base = OTHER; note = thymine
  misc_feature 1..17: note = Description of Artificial Sequence: Synthetic oligonucleotide
  source 1..17: mol_type = other RNA
gagacctgagctctttt

SEQ ID NO: 173 - RNA, 15 nt, synthetic construct
  misc_feature 1..15: note = Description of Artificial Sequence: Synthetic oligonucleotide
  source 1..15: mol_type = other RNA
gagacctgagctctt

SEQ ID NO: 174 - RNA, 15 nt, synthetic construct
  misc_feature 1..15: note = Description of Artificial Sequence: Synthetic oligonucleotide
  source 1..15: mol_type = other RNA
gagacctgagctctt

SEQ ID NO: 175 - RNA, 23 nt, synthetic construct
  modified_base 22..23: mod_base = OTHER; note = thymine
  misc_feature 1..23: note = Description of Artificial Sequence: Synthetic oligonucleotide
  source 1..23: mol_type = other RNA
ccctcagagacctgagctctttt

SEQ ID NO: 176 - RNA, 23 nt, synthetic construct
  modified_base 22..23: mod_base = OTHER; note = thymine
  misc_feature 1..23: note = Description of Artificial Sequence: Synthetic oligonucleotide
  source 1..23: mol_type = other RNA
ctcagagacctgagctcttcttt

SEQ ID NO: 177 - RNA, 23 nt, synthetic construct
  modified_base 22..23: mod_base = OTHER; note = thymine
  misc_feature 1..23: note = Description of Artificial Sequence: Synthetic oligonucleotide
  source 1..23: mol_type = other RNA
gggtccctggacactccctattt

SEQ ID NO: 178 - RNA, 23 nt, synthetic construct
  modified_base 22..23: mod_base = OTHER; note = thymine
  misc_feature 1..23: note = Description of Artificial Sequence: Synthetic oligonucleotide
  source 1..23: mol_type = other RNA
tccctggacactccctatggatt

SEQ ID NO: 179 - RNA, 23 nt, synthetic construct
  modified_base 22..23: mod_base = OTHER; note = thymine
  misc_feature 1..23: note = Description of Artificial Sequence: Synthetic oligonucleotide
  source 1..23: mol_type = other RNA
ctggacactccctatggagattt

SEQ ID NO: 180 - RNA, 23 nt, synthetic construct
  modified_base 22..23: mod_base = OTHER; note = thymine
  misc_feature 1..23: note = Description of Artificial Sequence: Synthetic oligonucleotide
  source 1..23: mol_type = other RNA
acctgccacagccagaactgatt

SEQ ID NO: 181 - RNA, 23 nt, synthetic construct
  modified_base 22..23: mod_base = OTHER; note = thymine
  misc_feature 1..23: note = Description of Artificial Sequence: Synthetic oligonucleotide
  source 1..23: mol_type = other RNA
ggcagctcccagggggtagaatt

SEQ ID NO: 182 - RNA, 23 nt, synthetic construct
  modified_base 22..23: mod_base = OTHER; note = thymine
  misc_feature 1..23: note = Description of Artificial Sequence: Synthetic oligonucleotide
  source 1..23: mol_type = other RNA
gggtagaacggccctgtgctttt

SEQ ID NO: 183 - RNA, 23 nt, synthetic construct
  modified_base 22..23: mod_base = OTHER; note = thymine
  misc_feature 1..23: note = Description of Artificial Sequence: Synthetic oligonucleotide
  source 1..23: mol_type = other RNA
aacggccctgtgcttaagacatt

SEQ ID NO: 184 - RNA, 23 nt, synthetic construct
  modified_base 22..23: mod_base = OTHER; note = thymine
  misc_feature 1..23: note = Description of Artificial Sequence: Synthetic oligonucleotide
  source 1..23: mol_type = other RNA
cggccctgtgcttaagacacttt

SEQ ID NO: 185 - RNA, 23 nt, synthetic construct
  modified_base 22..23: mod_base = OTHER; note = thymine
  misc_feature 1..23: note = Description of Artificial Sequence: Synthetic oligonucleotide
  source 1..23: mol_type = other RNA
ttgcttcacatcctcaaaaaatt

SEQ ID NO: 186 - RNA, 23 nt, synthetic construct
  modified_base 22..23: mod_base = OTHER; note = thymine
  misc_feature 1..23: note = Description of Artificial Sequence: Synthetic oligonucleotide
  source 1..23: mol_type = other RNA
tgcttcacatcctcaaaaaaatt

SEQ ID NO: 187 - RNA, 23 nt, synthetic construct
  modified_base 22..23: mod_base = OTHER; note = thymine
  misc_feature 1..23: note = Description of Artificial Sequence: Synthetic oligonucleotide
  source 1..23: mol_type = other RNA
tactttgtgagcaatcttgactt

SEQ ID NO: 188 - RNA, 23 nt, synthetic construct
  modified_base 22..23: mod_base = OTHER; note = thymine
  misc_feature 1..23: note = Description of Artificial Sequence: Synthetic oligonucleotide
  source 1..23: mol_type = other RNA
attcacttgggatacactgactt

SEQ ID NO: 189 - RNA, 23 nt, synthetic construct
  modified_base 22..23: mod_base = OTHER; note = thymine
  misc_feature 1..23: note = Description of Artificial Sequence: Synthetic oligonucleotide
  source 1..23: mol_type = other RNA
acatgaaaactcattgtgcaatt

SEQ ID NO: 190 - RNA, 23 nt, synthetic construct
  modified_base 22..23: mod_base = OTHER; note = thymine
  misc_feature 1..23: note = Description of Artificial Sequence: Synthetic oligonucleotide
  source 1..23: mol_type = other RNA
tctttacagtcatcttctccatt

SEQ ID NO: 191 - RNA, 23 nt, synthetic construct
  modified_base 22..23: mod_base = OTHER; note = thymine
  misc_feature 1..23: note = Description of Artificial Sequence: Synthetic oligonucleotide
  source 1..23: mol_type = other RNA
tatctttacagtcatcttctctt

SEQ ID NO: 192 - RNA, 23 nt, synthetic construct
  modified_base 22..23: mod_base = OTHER; note = thymine
  misc_feature 1..23: note = Description of Artificial Sequence: Synthetic oligonucleotide
  source 1..23: mol_type = other RNA
aacatttatgaacatcatgagtt

SEQ ID NO: 193 - RNA, 23 nt, synthetic construct
  modified_base 22..23: mod_base = OTHER; note = thymine
  misc_feature 1..23: note = Description of Artificial Sequence: Synthetic oligonucleotide
  source 1..23: mol_type = other RNA
tcacaaactttataaatggagtt

SEQ ID NO: 194 - RNA, 23 nt, synthetic construct
  modified_base 22..23: mod_base = OTHER; note = thymine
  misc_feature 1..23: note = Description of Artificial Sequence: Synthetic oligonucleotide
  source 1..23: mol_type = other RNA
atcacaaactttataaatggatt

SEQ ID NO: 195 - RNA, 23 nt, synthetic construct
  modified_base 22..23: mod_base = OTHER; note = thymine
  misc_feature 1..23: note = Description of Artificial Sequence: Synthetic oligonucleotide
  source 1..23: mol_type = other RNA
atactacagtattttccggtatt

SEQ ID NO: 196 - RNA, 23 nt, synthetic construct
  modified_base 22..23: mod_base = OTHER; note = thymine
  misc_feature 1..23: note = Description of Artificial Sequence: Synthetic oligonucleotide
  source 1..23: mol_type = other RNA
tcatactacagtattttccggtt

SEQ ID NO: 197 - RNA, 23 nt, synthetic construct
  modified_base 22..23: mod_base = OTHER; note = thymine
  misc_feature 1..23: note = Description of Artificial Sequence: Synthetic oligonucleotide
  source 1..23: mol_type = other RNA
acaaattccccatatctggcatt

SEQ ID NO: 198 - RNA, 23 nt, synthetic construct
  modified_base 22..23: mod_base = OTHER; note = thymine
  misc_feature 1..23: note = Description of Artificial Sequence: Synthetic oligonucleotide
  source 1..23: mol_type = other RNA
aagatatacccttcttcacagtt

SEQ ID NO: 199 - RNA, 23 nt, synthetic construct
  modified_base 22..23: mod_base = OTHER; note = thymine
  misc_feature 1..23: note = Description of Artificial Sequence: Synthetic oligonucleotide
  source 1..23: mol_type = other RNA
ttagctttgcaatactgtccatt

SEQ ID NO: 200 - RNA, 23 nt, synthetic construct
  modified_base 22..23: mod_base = OTHER; note = thymine
  misc_feature 1..23: note = Description of Artificial Sequence: Synthetic oligonucleotide
  source 1..23: mol_type = other RNA
atcattagctttgcaatactgtt

SEQ ID NO: 201 - RNA, 23 nt, synthetic construct
  modified_base 22..23: mod_base = OTHER; note = thymine
  misc_feature 1..23: note = Description of Artificial Sequence: Synthetic oligonucleotide
  source 1..23: mol_type = other RNA
aaaggaatcattagctttgcatt

SEQ ID NO: 202 - RNA, 23 nt, synthetic construct
  modified_base 22..23: mod_base = OTHER; note = thymine
  misc_feature 1..23: note = Description of Artificial Sequence: Synthetic oligonucleotide
  source 1..23: mol_type = other RNA
atgaatatcaccaattaacaatt

SEQ ID NO: 203 - RNA, 23 nt, synthetic construct
  modified_base 22..23: mod_base = OTHER; note = thymine
  misc_feature 1..23: note = Description of Artificial Sequence: Synthetic oligonucleotide
  source 1..23: mol_type = other RNA
aaaaaaccttattttgcacggtt

SEQ ID NO: 204 - RNA, 23 nt, synthetic construct
  modified_base 22..23: mod_base = OTHER; note = thymine
  misc_feature 1..23: note = Description of Artificial Sequence: Synthetic oligonucleotide
  source 1..23: mol_type = other RNA
tgaaaaaaccttattttgcactt

SEQ ID NO: 205 - RNA, 23 nt, synthetic construct
  modified_base 22..23: mod_base = OTHER; note = thymine
  misc_feature 1..23: note = Description of Artificial Sequence: Synthetic oligonucleotide
  source 1..23: mol_type = other RNA
aatgtcaactgaaaaaacctttt

SEQ ID NO: 206 - RNA, 23 nt, synthetic construct
  modified_base 22..23: mod_base = OTHER; note = thymine
  misc_feature 1..23: note = Description of Artificial Sequence: Synthetic oligonucleotide
  source 1..23: mol_type = other RNA
taatgtcaactgaaaaaaccttt

SEQ ID NO: 207 - RNA, 23 nt, synthetic construct
  modified_base 22..23: mod_base = OTHER; note = thymine
  misc_feature 1..23: note = Description of Artificial Sequence: Synthetic oligonucleotide
  source 1..23: mol_type = other RNA
ttaaaccattaatgtcaactgtt

SEQ ID NO: 208 - RNA, 23 nt, synthetic construct
  modified_base 22..23: mod_base = OTHER; note = thymine
  misc_feature 1..23: note = Description of Artificial Sequence: Synthetic oligonucleotide
  source 1..23: mol_type = other RNA
tatttaaaccattaatgtcaatt

SEQ ID NO: 209 - RNA, 23 nt, synthetic construct
  modified_base 22..23: mod_base = OTHER; note = thymine
  misc_feature 1..23: note = Description of Artificial Sequence: Synthetic oligonucleotide
  source 1..23: mol_type = other RNA
tagattttattattaacccagtt

SEQ ID NO: 210 - RNA, 23 nt, synthetic construct
  modified_base 22..23: mod_base = OTHER; note = thymine
  misc_feature 1..23: note = Description of Artificial Sequence: Synthetic oligonucleotide
  source 1..23: mol_type = other RNA
atagattttattattaacccatt

SEQ ID NO: 211 - RNA, 23 nt, synthetic construct
  modified_base 22..23: mod_base = OTHER; note = thymine
  misc_feature 1..23: note = Description of Artificial Sequence: Synthetic oligonucleotide
  source 1..23: mol_type = other RNA
aaatttaccatatctatgcggtt

SEQ ID NO: 212 - RNA, 23 nt, synthetic construct
  modified_base 22..23: mod_base = OTHER; note = thymine
  misc_feature 1..23: note = Description of Artificial Sequence: Synthetic oligonucleotide
  source 1..23: mol_type = other RNA
aagttttcagttataagggtatt

SEQ ID NO: 213 - RNA, 23 nt, synthetic construct
  modified_base 22..23: mod_base = OTHER; note = thymine
  misc_feature 1..23: note = Description of Artificial Sequence: Synthetic oligonucleotide
  source 1..23: mol_type = other RNA
aataaataaccaacagttgggtt

SEQ ID NO: 214 - RNA, 23 nt, synthetic construct
  modified_base 22..23: mod_base = OTHER; note = thymine
  misc_feature 1..23: note = Description of Artificial Sequence: Synthetic oligonucleotide
  source 1..23: mol_type = other RNA
agaaaaataaataaccaacagtt

SEQ ID NO: 215 - RNA, 23 nt, synthetic construct
  modified_base 22..23: mod_base = OTHER; note = thymine
  misc_feature 1..23: note = Description of Artificial Sequence: Synthetic oligonucleotide
  source 1..23: mol_type = other RNA
atatcatatccagagttaccctt

SEQ ID NO: 216 - RNA, 23 nt, synthetic construct
  modified_base 22..23: mod_base = OTHER; note = thymine
  misc_feature 1..23: note = Description of Artificial Sequence: Synthetic oligonucleotide
  source 1..23: mol_type = other RNA
agtttcaatgtaatcaaaccgtt

SEQ ID NO: 217 - RNA, 23 nt, synthetic construct
  modified_base 22..23: mod_base = OTHER; note = thymine
  misc_feature 1..23: note = Description of Artificial Sequence: Synthetic oligonucleotide
  source 1..23: mol_type = other RNA
ttacagtttcaatgtaatcaatt

SEQ ID NO: 218 - RNA, 23 nt, synthetic construct
  modified_base 22..23: mod_base = OTHER; note = thymine
  misc_feature 1..23: note = Description of Artificial Sequence: Synthetic oligonucleotide
  source 1..23: mol_type = other RNA
ataagttacagtttcaatgtatt

SEQ ID NO: 219 - RNA, 23 nt, synthetic construct
  modified_base 22..23: mod_base = OTHER; note = thymine
  misc_feature 1..23: note = Description of Artificial Sequence: Synthetic oligonucleotide
  source 1..23: mol_type = other RNA
tctttacacggattggtagcatt

SEQ ID NO: 220 - RNA, 23 nt, synthetic construct
  modified_base 22..23: mod_base = OTHER; note = thymine
  misc_feature 1..23: note = Description of Artificial Sequence: Synthetic oligonucleotide
  source 1..23: mol_type = other RNA
aaaatcaatcccgacaaagaatt

SEQ ID NO: 221 - RNA, 23 nt, synthetic construct
  modified_base 22..23: mod_base = OTHER; note = thymine
  misc_feature 1..23: note = Description of Artificial Sequence: Synthetic oligonucleotide
  source 1..23: mol_type = other RNA
tctgaaaaaaagatagtgctgtt

SEQ ID NO: 222 - RNA, 23 nt, synthetic construct
  modified_base 22..23: mod_base = OTHER; note = thymine
  misc_feature 1..23: note = Description of Artificial Sequence: Synthetic oligonucleotide
  source 1..23: mol_type = other RNA
atctgaaaaaaagatagtgcttt

SEQ ID NO: 223 - RNA, 23 nt, synthetic construct
  modified_base 22..23: mod_base = OTHER; note = thymine
  misc_feature 1..23: note = Description of Artificial Sequence: Synthetic oligonucleotide
  source 1..23: mol_type = other RNA
aaaaatcatgtgttttgacattt

SEQ ID NO: 224 - RNA, 23 nt, synthetic construct
  modified_base 22..23: mod_base = OTHER; note = thymine
  misc_feature 1..23: note = Description of Artificial Sequence: Synthetic oligonucleotide
  source 1..23: mol_type = other RNA
tttgcttaaaaatcatgtgtttt

SEQ ID NO: 225 - RNA, 23 nt, synthetic construct
  modified_base 22..23: mod_base = OTHER; note = thymine
  misc_feature 1..23: note = Description of Artificial Sequence: Synthetic oligonucleotide
  source 1..23: mol_type = other RNA
aactttcaacattttccaccctt

SEQ ID NO: 226 - RNA, 23 nt, synthetic construct
  modified_base 22..23: mod_base = OTHER; note = thymine
  misc_feature 1..23: note = Description of Artificial Sequence: Synthetic oligonucleotide
  source 1..23: mol_type = other RNA
ttgaaatccaatcaaaagccatt

SEQ ID NO: 227 - RNA, 23 nt, synthetic construct
  modified_base 22..23: mod_base = OTHER; note = thymine
  misc_feature 1..23: note = Description of Artificial Sequence: Synthetic oligonucleotide
  source 1..23: mol_type = other RNA
tttgaaatccaatcaaaagcctt

SEQ ID NO: 228 - RNA, 23 nt, synthetic construct
  modified_base 22..23: mod_base = OTHER; note = thymine
  misc_feature 1..23: note = Description of Artificial Sequence: Synthetic oligonucleotide
  source 1..23: mol_type = other RNA
tagagattctttgaaatccaatt

SEQ ID NO: 229 - RNA, 23 nt, synthetic construct
  modified_base 22..23: mod_base = OTHER; note = thymine
  misc_feature 1..23: note = Description of Artificial Sequence: Synthetic oligonucleotide
  source 1..23: mol_type = other RNA
atagagattctttgaaatccatt

SEQ ID NO: 230 - RNA, 23 nt, synthetic construct
  modified_base 22..23: mod_base = OTHER; note = thymine
  misc_feature 1..23: note = Description of Artificial Sequence: Synthetic oligonucleotide
  source 1..23: mol_type = other RNA
tttaaatactgaactactgtgtt

SEQ ID NO: 231 - RNA, 23 nt, synthetic construct
  modified_base 22..23: mod_base = OTHER; note = thymine
  misc_feature 1..23: note = Description of Artificial Sequence: Synthetic oligonucleotide
  source 1..23: mol_type = other RNA
tatttaaatactgaactactgtt

SEQ ID NO: 232 - RNA, 23 nt, synthetic construct
  modified_base 22..23: mod_base = OTHER; note = thymine
  misc_feature 1..23: note = Description of Artificial Sequence: Synthetic oligonucleotide
  source 1..23: mol_type = other RNA
atagatacccggcaaaaggattt

SEQ ID NO: 233 - RNA, 23 nt, synthetic construct
  modified_base 22..23: mod_base = OTHER; note = thymine
  misc_feature 1..23: note = Description of Artificial Sequence: Synthetic oligonucleotide
  source 1..23: mol_type = other RNA
aagagtagtgtttattacaggtt

SEQ ID NO: 234 - RNA, 23 nt, synthetic construct
  modified_base 22..23: mod_base = OTHER; note = thymine
  misc_feature 1..23: note = Description of Artificial Sequence: Synthetic oligonucleotide
  source 1..23: mol_type = other RNA
atcaaaataggcatctacccatt

SEQ ID NO: 235 - RNA, 23 nt, synthetic construct
  modified_base 22..23: mod_base = OTHER; note = thymine
  misc_feature 1..23: note = Description of Artificial Sequence: Synthetic oligonucleotide
  source 1..23: mol_type = other RNA
tcaattttatcaaaataggcatt

SEQ ID NO: 236 - RNA, 23 nt, synthetic construct
  modified_base 22..23: mod_base = OTHER; note = thymine
  misc_feature 1..23: note = Description of Artificial Sequence: Synthetic oligonucleotide
  source 1..23: mol_type = other RNA
taaatgctctccaaagatggctt

SEQ ID NO: 237 - RNA, 23 nt, synthetic construct
  modified_base 22..23: mod_base = OTHER; note = thymine
  misc_feature 1..23: note = Description of Artificial Sequence: Synthetic oligonucleotide
  source 1..23: mol_type = other RNA
tcaaatgcagtatgtaagcaatt

SEQ ID NO: 238 - RNA, 23 nt, synthetic construct
  modified_base 22..23: mod_base = OTHER; note = thymine
  misc_feature 1..23: note = Description of Artificial Sequence: Synthetic oligonucleotide
  source 1..23: mol_type = other RNA
ttcaaatgcagtatgtaagcatt

SEQ ID NO: 239 - RNA, 23 nt, synthetic construct
  modified_base 22..23: mod_base = OTHER; note = thymine
  misc_feature 1..23: note = Description of Artificial Sequence: Synthetic oligonucleotide
  source 1..23: mol_type = other RNA
tgattacaggcgttagaaccatt

SEQ ID NO: 240 - RNA, 23 nt, synthetic construct
  modified_base 22..23: mod_base = OTHER; note = thymine
  misc_feature 1..23: note = Description of Artificial Sequence: Synthetic oligonucleotide
  source 1..23: mol_type = other RNA
tgttatcatgacaatcatcgatt

SEQ ID NO: 241 - RNA, 23 nt, synthetic construct
  modified_base 22..23: mod_base = OTHER; note = thymine
  misc_feature 1..23: note = Description of Artificial Sequence: Synthetic oligonucleotide
  source 1..23: mol_type = other RNA
ttatcacaggtgtattgggtgtt

SEQ ID NO: 242 - RNA, 23 nt, synthetic construct
  modified_base 22..23: mod_base = OTHER; note = thymine
  misc_feature 1..23: note = Description of Artificial Sequence: Synthetic oligonucleotide
  source 1..23: mol_type = other RNA
attatcacaggtgtattgggttt

SEQ ID NO: 243 - RNA, 23 nt, synthetic construct
  modified_base 22..23: mod_base = OTHER; note = thymine
  misc_feature 1..23: note = Description of Artificial Sequence: Synthetic oligonucleotide
  source 1..23: mol_type = other RNA
agttctttgagatacactggttt

SEQ ID NO: 244 - RNA, 23 nt, synthetic construct
  modified_base 22..23: mod_base = OTHER; note = thymine
  misc_feature 1..23: note = Description of Artificial Sequence: Synthetic oligonucleotide
  source 1..23: mol_type = other RNA
tcgaattgcagttcttttcattt

SEQ ID NO: 245 - RNA, 23 nt, synthetic construct
  modified_base 22..23: mod_base = OTHER; note = thymine
  misc_feature 1..23: note = Description of Artificial Sequence: Synthetic oligonucleotide
  source 1..23: mol_type = other RNA
tcaatacatcgatgattggggtt

SEQ ID NO: 246 - RNA, 23 nt, synthetic construct
  modified_base 22..23: mod_base = OTHER; note = thymine
  misc_feature 1..23: note = Description of Artificial Sequence: Synthetic oligonucleotide
  source 1..23: mol_type = other RNA
aacgataggtcaatacatcgatt

SEQ ID NO: 247 - RNA, 23 nt, synthetic construct
  modified_base 22..23: mod_base = OTHER; note = thymine
  misc_feature 1..23: note = Description of Artificial Sequence: Synthetic oligonucleotide
  source 1..23: mol_type = other RNA
acaaacgataggtcaatacattt

SEQ ID NO: 248 - RNA, 23 nt, synthetic construct
  modified_base 22..23: mod_base = OTHER; note = thymine
  misc_feature 1..23: note = Description of Artificial Sequence: Synthetic oligonucleotide
  source 1..23: mol_type = other RNA
tcaaaaacaccatcacaacgatt

SEQ ID NO: 249 - RNA, 23 nt, synthetic construct
  modified_base 22..23: mod_base = OTHER; note = thymine
  misc_feature 1..23: note = Description of Artificial Sequence: Synthetic oligonucleotide
  source 1..23: mol_type = other RNA
tcacattcccagaagttcgggtt

SEQ ID NO: 250 - RNA, 23 nt, synthetic construct
  modified_base 22..23: mod_base = OTHER; note = thymine
  misc_feature 1..23: note = Description of Artificial Sequence: Synthetic oligonucleotide
  source 1..23: mol_type = other RNA
atcacattcccagaagttcggtt

SEQ ID NO: 251 - RNA, 23 nt, synthetic construct
  modified_base 22..23: mod_base = OTHER; note = thymine
  misc_feature 1..23: note = Description of Artificial Sequence: Synthetic oligonucleotide
  source 1..23: mol_type = other RNA
tgatgaagggcaagtcttgggtt

SEQ ID NO: 252 - RNA, 23 nt, synthetic construct
  modified_base 22..23: mod_base = OTHER; note = thymine
  misc_feature 1..23: note = Description of Artificial Sequence: Synthetic oligonucleotide
  source 1..23: mol_type = other RNA
agaatcattggcaagtaagaatt

SEQ ID NO: 253 - RNA, 23 nt, synthetic construct
  modified_base 22..23: mod_base = OTHER; note = thymine
  misc_feature 1..23: note = Description of Artificial Sequence: Synthetic oligonucleotide
  source 1..23: mol_type = other RNA
tatcacattcatctatgtctttt

SEQ ID NO: 254 - RNA, 23 nt, synthetic construct
  modified_base 22..23: mod_base = OTHER; note = thymine
  misc_feature 1..23: note = Description of Artificial Sequence: Synthetic oligonucleotide
  source 1..23: mol_type = other RNA
aatatcacattcatctatgtctt

SEQ ID NO: 255 - RNA, 23 nt, synthetic construct
  modified_base 22..23: mod_base = OTHER; note = thymine
  misc_feature 1..23: note = Description of Artificial Sequence: Synthetic oligonucleotide
  source 1..23: mol_type = other RNA
aacatgtagcctgtatcacactt

SEQ ID NO: 256 - RNA, 23 nt, synthetic construct
  modified_base 22..23: mod_base = OTHER; note = thymine
  misc_feature 1..23: note = Description of Artificial Sequence: Synthetic oligonucleotide
  source 1..23: mol_type = other RNA
tcactttctaacatgtagccttt

SEQ ID NO: 257 - RNA, 23 nt, synthetic construct
  modified_base 22..23: mod_base = OTHER; note = thymine
  misc_feature 1..23: note = Description of Artificial Sequence: Synthetic oligonucleotide
  source 1..23: mol_type = other RNA
atcactttctaacatgtagcctt

SEQ ID NO: 258 - RNA, 23 nt, synthetic construct
  modified_base 22..23: mod_base = OTHER; note = thymine
  misc_feature 1..23: note = Description of Artificial Sequence: Synthetic oligonucleotide
  source 1..23: mol_type = other RNA
aatgtaagaaccattctcgactt

SEQ ID NO: 259 - RNA, 23 nt, synthetic construct
  modified_base 22..23: mod_base = OTHER; note = thymine
  misc_feature 1..23: note = Description of Artificial Sequence: Synthetic oligonucleotide
  source 1..23: mol_type = other RNA
tacaatgtaagaaccattctctt

SEQ ID NO: 260 - RNA, 23 nt, synthetic construct
  modified_base 22..23: mod_base = OTHER; note = thymine
  misc_feature 1..23: note = Description of Artificial Sequence: Synthetic oligonucleotide
  source 1..23: mol_type = other RNA
aaaatcaacagctacaatgtatt

SEQ ID NO: 261 - RNA, 23 nt, synthetic construct
  modified_base 22..23: mod_base = OTHER; note = thymine
  misc_feature 1..23: note = Description of Artificial Sequence: Synthetic oligonucleotide
  source 1..23: mol_type = other RNA
attgaatcaaaatcaacagcttt

SEQ ID NO: 262 - RNA, 23 nt, synthetic construct
  modified_base 22..23: mod_base = OTHER; note = thymine
  misc_feature 1..23: note = Description of Artificial Sequence: Synthetic oligonucleotide
  source 1..23: mol_type = other RNA
taattgaatcaaaatcaacagtt

SEQ ID NO: 263 - RNA, 23 nt, synthetic construct
  modified_base 22..23: mod_base = OTHER; note = thymine
  misc_feature 1..23: note = Description of Artificial Sequence: Synthetic oligonucleotide
  source 1..23: mol_type = other RNA
aagatacgaccactaattgaatt

SEQ ID NO: 264 - RNA, 23 nt, synthetic construct
  modified_base 22..23: mod_base = OTHER; note = thymine
  misc_feature 1..23: note = Description of Artificial Sequence: Synthetic oligonucleotide
  source 1..23: mol_type = other RNA
agtttcagtcaagatgatgcttt

SEQ ID NO: 265 - RNA, 23 nt, synthetic construct
  modified_base 22..23: mod_base = OTHER; note = thymine
  misc_feature 1..23: note = Description of Artificial Sequence: Synthetic oligonucleotide
  source 1..23: mol_type = other RNA
aatagtttcagtcaagatgattt

SEQ ID NO: 266 - RNA, 23 nt, synthetic construct
  modified_base 22..23: mod_base = OTHER; note = thymine
  misc_feature 1..23: note = Description of Artificial Sequence: Synthetic oligonucleotide
  source 1..23: mol_type = other RNA
tattgcaatagtttcagtcaatt

SEQ ID NO: 267 - RNA, 23 nt, synthetic construct
  modified_base 22..23: mod_base = OTHER; note = thymine
  misc_feature 1..23: note = Description of Artificial Sequence: Synthetic oligonucleotide
  source 1..23: mol_type = other RNA
tctattgcaatagtttcagtctt

SEQ ID NO: 268 - RNA, 23 nt, synthetic construct
  modified_base 22..23: mod_base = OTHER; note = thymine
  misc_feature 1..23: note = Description of Artificial Sequence: Synthetic oligonucleotide
  source 1..23: mol_type = other RNA
aatctattgcaatagtttcagtt

SEQ ID NO: 269 - RNA, 23 nt, synthetic construct
  modified_base 22..23: mod_base = OTHER; note = thymine
  misc_feature 1..23: note = Description of Artificial Sequence: Synthetic oligonucleotide
  source 1..23: mol_type = other RNA
attttggagacttcaattgtttt

SEQ ID NO: 270 - RNA, 23 nt, synthetic construct
  modified_base 22..23: mod_base = OTHER; note = thymine
  misc_feature 1..23: note = Description of Artificial Sequence: Synthetic oligonucleotide
  source 1..23: mol_type = other RNA
ttaggtttttactaatcagcatt

SEQ ID NO: 271 - RNA, 23 nt, synthetic construct
  modified_base 22..23: mod_base = OTHER; note = thymine
  misc_feature 1..23: note = Description of Artificial Sequence: Synthetic oligonucleotide
  source 1..23: mol_type = other RNA
tcattctgggatctaatgctatt

SEQ ID NO: 272 - RNA, 23 nt, synthetic construct
  modified_base 22..23: mod_base = OTHER; note = thymine
  misc_feature 1..23: note = Description of Artificial Sequence: Synthetic oligonucleotide
  source 1..23: mol_type = other RNA
ttcattctgggatctaatgcttt

SEQ ID NO: 273 - RNA, 23 nt, synthetic construct
  modified_base 22..23: mod_base = OTHER; note = thymine
  misc_feature 1..23: note = Description of Artificial Sequence: Synthetic oligonucleotide
  source 1..23: mol_type = other RNA
agtagatgctcattcattctgtt

SEQ ID NO: 274 - RNA, 23 nt, synthetic construct
  modified_base 22..23: mod_base = OTHER; note = thymine
  misc_feature 1..23: note = Description of Artificial Sequence: Synthetic oligonucleotide
  source 1..23: mol_type = other RNA
attataatcacaaaagtccattt

SEQ ID NO: 275 - RNA, 23 nt, synthetic construct
  modified_base 22..23: mod_base = OTHER; note = thymine
  misc_feature 1..23: note = Description of Artificial Sequence: Synthetic oligonucleotide
  source 1..23: mol_type = other RNA
tccattataatcacaaaagtctt

SEQ ID NO: 276 - RNA, 21 nt, synthetic construct
  modified_base 20..21: mod_base = OTHER; note = thymine
  misc_feature 1..21: note = Description of Artificial Sequence: Synthetic oligonucleotide
  source 1..21: mol_type = other RNA
tgccgtataatcaaatcactt

SEQ ID NO: 277 - RNA, 23 nt, synthetic construct
  modified_base 22..23: mod_base = OTHER; note = thymine
  misc_feature 1..23: note = Description of Artificial Sequence: Synthetic oligonucleotide
  source 1..23: mol_type = other RNA
atattatacattacaactgactt

SEQ ID NO: 278 - RNA, 23 nt, synthetic construct
  modified_base 22..23: mod_base = OTHER; note = thymine
  misc_feature 1..23: note = Description of Artificial Sequence: Synthetic oligonucleotide
  source 1..23: mol_type = other RNA
attgaatattatacattacaatt

SEQ ID NO: 279 - RNA, 23 nt, synthetic construct
  modified_base 22..23: mod_base = OTHER; note = thymine
  misc_feature 1..23: note = Description of Artificial Sequence: Synthetic oligonucleotide
  source 1..23: mol_type = other RNA
aatttggttgtttcgaaggattt

SEQ ID NO: 280 - RNA, 23 nt, synthetic construct
  modified_base 22..23: mod_base = OTHER; note = thymine
  misc_feature 1..23: note = Description of Artificial Sequence: Synthetic oligonucleotide
  source 1..23: mol_type = other RNA
acggaatttggttgtttcgaatt

SEQ ID NO: 281 - RNA, 23 nt, synthetic construct
  modified_base 22..23: mod_base = OTHER; note = thymine
  misc_feature 1..23: note = Description of Artificial Sequence: Synthetic oligonucleotide
  source 1..23: mol_type = other RNA
ttacagttattaagaaaggtttt

SEQ ID NO: 282 - RNA, 23 nt, synthetic construct
  modified_base 22..23: mod_base = OTHER; note = thymine
  misc_feature 1..23: note = Description of Artificial Sequence: Synthetic oligonucleotide
  source 1..23: mol_type = other RNA
tccaaaaattatatgttgccttt

SEQ ID NO: 283 - RNA, 23 nt, synthetic construct
  modified_base 22..23: mod_base = OTHER; note = thymine
  misc_feature 1..23: note = Description of Artificial Sequence: Synthetic oligonucleotide
  source 1..23: mol_type = other RNA
ttccaaaaattatatgttgcctt

SEQ ID NO: 284 - RNA, 23 nt, synthetic construct
  modified_base 22..23: mod_base = OTHER; note = thymine
  misc_feature 1..23: note = Description of Artificial Sequence: Synthetic oligonucleotide
  source 1..23: mol_type = other RNA
tctaaaccattctgtatcccttt

SEQ ID NO: 285 - RNA, 23 nt, synthetic construct
  modified_base 22..23: mod_base = OTHER; note = thymine
  misc_feature 1..23: note = Description of Artificial Sequence: Synthetic oligonucleotide
  source 1..23: mol_type = other RNA
atctaaaccattctgtatccctt

SEQ ID NO: 286 - RNA, 23 nt, synthetic construct
  modified_base 22..23: mod_base = OTHER; note = thymine
  misc_feature 1..23: note = Description of Artificial Sequence: Synthetic oligonucleotide
  source 1..23: mol_type = other RNA
ttcaacatctaaaccattctgtt

SEQ ID NO: 287 - RNA, 23 nt, synthetic construct
  modified_base 22..23: mod_base = OTHER; note = thymine
  misc_feature 1..23: note = Description of Artificial Sequence: Synthetic oligonucleotide
  source 1..23: mol_type = other RNA
attttcaacccaatagatgtatt

SEQ ID NO: 288 - RNA, 23 nt, synthetic construct
  modified_base 22..23: mod_base = OTHER; note = thymine
  misc_feature 1..23: note = Description of Artificial Sequence: Synthetic oligonucleotide
  source 1..23: mol_type = other RNA
tatagaagcaaatactgtccttt

SEQ ID NO: 289 - RNA, 23 nt, synthetic construct
  modified_base 22..23: mod_base = OTHER; note = thymine
  misc_feature 1..23: note = Description of Artificial Sequence: Synthetic oligonucleotide
  source 1..23: mol_type = other RNA
tagatatagaagcaaatactgtt

SEQ ID NO: 290 - RNA, 23 nt, synthetic construct
  modified_base 22..23: mod_base = OTHER; note = thymine
  misc_feature 1..23: note = Description of Artificial Sequence: Synthetic oligonucleotide
  source 1..23: mol_type = other RNA
taaggccaggttcatagaaggtt

SEQ ID NO: 291 - RNA, 23 nt, synthetic construct
  modified_base 22..23: mod_base = OTHER; note = thymine
  misc_feature 1..23: note = Description of Artificial Sequence: Synthetic oligonucleotide
  source 1..23: mol_type = other RNA
tcttgaaatccaatctaaggctt

SEQ ID NO: 292 - RNA, 23 nt, synthetic construct
  modified_base 22..23: mod_base = OTHER; note = thymine
  misc_feature 1..23: note = Description of Artificial Sequence: Synthetic oligonucleotide
  source 1..23: mol_type = other RNA
ataaaggtttcttgaaatccatt

SEQ ID NO: 293 - RNA, 23 nt, synthetic construct
  modified_base 22..23: mod_base = OTHER; note = thymine
  misc_feature 1..23: note = Description of Artificial Sequence: Synthetic oligonucleotide
  source 1..23: mol_type = other RNA
tcaaaacctcgattgactgagtt

SEQ ID NO: 294 - RNA, 23 nt, synthetic construct
  modified_base 22..23: mod_base = OTHER; note = thymine
  misc_feature 1..23: note = Description of Artificial Sequence: Synthetic oligonucleotide
  source 1..23: mol_type = other RNA
ttctgtatctgatatctccgttt

SEQ ID NO: 295 - RNA, 23 nt, synthetic construct
  modified_base 22..23: mod_base = OTHER; note = thymine
  misc_feature 1..23: note = Description of Artificial Sequence: Synthetic oligonucleotide
  source 1..23: mol_type = other RNA
tttctgtatctgatatctccgtt

SEQ ID NO: 296 - RNA, 23 nt, synthetic construct
  modified_base 22..23: mod_base = OTHER; note = thymine
  misc_feature 1..23: note = Description of Artificial Sequence: Synthetic oligonucleotide
  source 1..23: mol_type = other RNA
tttttctgtatctgatatctctt

SEQ ID NO: 297 - RNA, 23 nt, synthetic construct
  modified_base 22..23: mod_base = OTHER; note = thymine
  misc_feature 1..23: note = Description of Artificial Sequence: Synthetic oligonucleotide
  source 1..23: mol_type = other RNA
atcaatgtttttctgtatctgtt

SEQ ID NO: 298 - RNA, 23 nt, synthetic construct
  modified_base 22..23: mod_base = OTHER; note = thymine
  misc_feature 1..23: note = Description of Artificial Sequence: Synthetic oligonucleotide
  source 1..23: mol_type = other RNA
ataaaggaaagaatcatggactt

SEQ ID NO: 299 - RNA, 23 nt, synthetic construct
  modified_base 22..23: mod_base = OTHER; note = thymine
  misc_feature 1..23: note = Description of Artificial Sequence: Synthetic oligonucleotide
  source 1..23: mol_type = other RNA
aataaaggaaagaatcatggatt

SEQ ID NO: 300 - RNA, 23 nt, synthetic construct
  modified_base 22..23: mod_base = OTHER; note = thymine
  misc_feature 1..23: note = Description of Artificial Sequence: Synthetic oligonucleotide
  source 1..23: mol_type = other RNA
tcagtataataaaggaaagaatt

SEQ ID NO: 301 - RNA, 23 nt, synthetic construct
  modified_base 22..23: mod_base = OTHER; note = thymine
  misc_feature 1..23: note = Description of Artificial Sequence: Synthetic oligonucleotide
  source 1..23: mol_type = other RNA
tttcaatgacctcatactgtttt

SEQ ID NO: 302 - RNA, 23 nt, synthetic construct
  modified_base 22..23: mod_base = OTHER; note = thymine
  misc_feature 1..23: note = Description of Artificial Sequence: Synthetic oligonucleotide
  source 1..23: mol_type = other RNA
atttggaacattatctctcaatt

SEQ ID NO: 303 - RNA, 23 nt, synthetic construct
  modified_base 22..23: mod_base = OTHER; note = thymine
  misc_feature 1..23: note = Description of Artificial Sequence: Synthetic oligonucleotide
  source 1..23: mol_type = other RNA
agatttggaacattatctctctt

SEQ ID NO: 304 - RNA, 23 nt, synthetic construct
  modified_base 22..23: mod_base = OTHER; note = thymine
  misc_feature 1..23: note = Description of Artificial Sequence: Synthetic oligonucleotide
  source 1..23: mol_type = other RNA
tcagatttggaacattatctctt

SEQ ID NO: 305 - RNA, 21 nt, synthetic construct
  modified_base 20..21: mod_base = OTHER; note = thymine
  misc_feature 1..21: note = Description of Artificial Sequence: Synthetic oligonucleotide
  source 1..21: mol_type = other RNA
ttgctacagccatttgaggtt

SEQ ID NO: 306 - RNA, 23 nt, synthetic construct
  modified_base 22..23: mod_base = OTHER; note = thymine
  misc_feature 1..23: note = Description of Artificial Sequence: Synthetic oligonucleotide
  source 1..23: mol_type = other RNA
atgaaagagttatatggagagtt

SEQ ID NO: 307 - RNA, 23 nt, synthetic construct
  modified_base 22..23: mod_base = OTHER; note = thymine
  misc_feature 1..23: note = Description of Artificial Sequence: Synthetic oligonucleotide
  source 1..23: mol_type = other RNA
acaatgaaagagttatatggatt

SEQ ID NO: 308 - RNA, 23 nt, synthetic construct
  modified_base 22..23: mod_base = OTHER; note = thymine
  misc_feature 1..23: note = Description of Artificial Sequence: Synthetic oligonucleotide
  source 1..23: mol_type = other RNA
tgaaacaacaatgaaagagtttt

SEQ ID NO: 309 - RNA, 23 nt, synthetic construct
  modified_base 22..23: mod_base = OTHER; note = thymine
  misc_feature 1..23: note = Description of Artificial Sequence: Synthetic oligonucleotide
  source 1..23: mol_type = other RNA
attgaaacaacaatgaaagagtt

SEQ ID NO: 310 - RNA, 23 nt, synthetic construct
  modified_base 22..23: mod_base = OTHER; note = thymine
  misc_feature 1..23: note = Description of Artificial Sequence: Synthetic oligonucleotide
  source 1..23: mol_type = other RNA
agctaaagcctctgattgcagtt

SEQ ID NO: 311 - RNA, 23 nt, synthetic construct
  modified_base 22..23: mod_base = OTHER; note = thymine
  misc_feature 1..23: note = Description of Artificial Sequence: Synthetic oligonucleotide
  source 1..23: mol_type = other RNA
aagctaaagcctctgattgcatt

SEQ ID NO: 312 - RNA, 23 nt, synthetic construct
  modified_base 22..23: mod_base = OTHER; note = thymine
  misc_feature 1..23: note = Description of Artificial Sequence: Synthetic oligonucleotide
  source 1..23: mol_type = other RNA
acaattccaagctaaagcctctt

SEQ ID NO: 313 - RNA, 23 nt, synthetic construct
  modified_base 22..23: mod_base = OTHER; note = thymine
  misc_feature 1..23: note = Description of Artificial Sequence: Synthetic oligonucleotide
  source 1..23: mol_type = other RNA
tgacaattccaagctaaagcctt

SEQ ID NO: 314 - RNA, 23 nt, synthetic construct
  modified_base 22..23: mod_base = OTHER; note = thymine
  misc_feature 1..23: note = Description of Artificial Sequence: Synthetic oligonucleotide
  source 1..23: mol_type = other RNA
tgaatgatctgacaattccaatt

SEQ ID NO: 315 - RNA, 23 nt, synthetic construct
  modified_base 22..23: mod_base = OTHER; note = thymine
  misc_feature 1..23: note = Description of Artificial Sequence: Synthetic oligonucleotide
  source 1..23: mol_type = other RNA
atgttcatcagagaagatccatt

SEQ ID NO: 316 - RNA, 23 nt, synthetic construct
  modified_base 22..23: mod_base = OTHER; note = thymine
  misc_feature 1..23: note = Description of Artificial Sequence: Synthetic oligonucleotide
  source 1..23: mol_type = other RNA
tattccatgtgtcacaatgtttt

SEQ ID NO: 317 - RNA, 23 nt, synthetic construct
  modified_base 22..23: mod_base = OTHER; note = thymine
  misc_feature 1..23: note = Description of Artificial Sequence: Synthetic oligonucleotide
  source 1..23: mol_type = other RNA
acttctatcagtgtttcagaatt

SEQ ID NO: 318 - RNA, 23 nt, synthetic construct
  modified_base 22..23: mod_base = OTHER; note = thymine
  misc_feature 1..23: note = Description of Artificial Sequence: Synthetic oligonucleotide
  source 1..23: mol_type = other RNA
tattgatccgcagaacttctatt

SEQ ID NO: 319 - RNA, 23 nt, synthetic construct
  modified_base 22..23: mod_base = OTHER; note = thymine
  misc_feature 1..23: note = Description of Artificial Sequence: Synthetic oligonucleotide
  source 1..23: mol_type = other RNA
tgttcttgggatctacaacaatt

SEQ ID NO: 320 - RNA, 23 nt, synthetic construct
  modified_base 22..23: mod_base = OTHER; note = thymine
  misc_feature 1..23: note = Description of Artificial Sequence: Synthetic oligonucleotide
  source 1..23: mol_type = other RNA
aaagaacgctcaatctttggttt

SEQ ID NO: 321 - RNA, 23 nt, synthetic construct
  modified_base 22..23: mod_base = OTHER; note = thymine
  misc_feature 1..23: note = Description of Artificial Sequence: Synthetic oligonucleotide
  source 1..23: mol_type = other RNA
taaacgtagccatcacttcggtt

SEQ ID NO: 322 - RNA, 23 nt, synthetic construct
  modified_base 22..23: mod_base = OTHER; note = thymine
  misc_feature 1..23: note = Description of Artificial Sequence: Synthetic oligonucleotide
  source 1..23: mol_type = other RNA
atctaaagaatcatcaacccatt

SEQ ID NO: 323 - RNA, 23 nt, synthetic construct
  modified_base 22..23: mod_base = OTHER; note = thymine
  misc_feature 1..23: note = Description of Artificial Sequence: Synthetic oligonucleotide
  source 1..23: mol_type = other RNA
ttatatctaaagaatcatcaatt

SEQ ID NO: 324 - RNA, 23 nt, synthetic construct
  modified_base 22..23: mod_base = OTHER; note = thymine
  misc_feature 1..23: note = Description of Artificial Sequence: Synthetic oligonucleotide
  source 1..23: mol_type = other RNA
atagaattttcaaaaacagtgtt

SEQ ID NO: 325 - RNA, 23 nt, synthetic construct
  modified_base 22..23: mod_base = OTHER; note = thymine
  misc_feature 1..23: note = Description of Artificial Sequence: Synthetic oligonucleotide
  source 1..23: mol_type = other RNA
tgatagaattttcaaaaacagtt

SEQ ID NO: 326 - RNA, 23 nt, synthetic construct
  modified_base 22..23: mod_base = OTHER; note = thymine
  misc_feature 1..23: note = Description of Artificial Sequence: Synthetic oligonucleotide
  source 1..23: mol_type = other RNA
tttcaaattcctatctacccatt

SEQ ID NO: 327 - RNA, 23 nt, synthetic construct
  modified_base 22..23: mod_base = OTHER; note = thymine
  misc_feature 1..23: note = Description of Artificial Sequence: Synthetic oligonucleotide
  source 1..23: mol_type = other RNA
ttttcaaattcctatctaccctt

SEQ ID NO: 328 - RNA, 23 nt, synthetic construct
  modified_base 22..23: mod_base = OTHER; note = thymine
  misc_feature 1..23: note = Description of Artificial Sequence: Synthetic oligonucleotide
  source 1..23: mol_type = other RNA
atattgtctcttatcactgtgtt

SEQ ID NO: 329 - RNA, 23 nt, synthetic construct
  modified_base 22..23: mod_base = OTHER; note = thymine
  misc_feature 1..23: note = Description of Artificial Sequence: Synthetic oligonucleotide
  source 1..23: mol_type = other RNA
tgatattgtctcttatcactgtt

SEQ ID NO: 330 - RNA, 23 nt, synthetic construct
  modified_base 22..23: mod_base = OTHER; note = thymine
  misc_feature 1..23: note = Description of Artificial Sequence: Synthetic oligonucleotide
  source 1..23: mol_type = other RNA
tgaaatggcacaattcttgcctt

SEQ ID NO: 331 - RNA, 23 nt, synthetic construct
  modified_base 22..23: mod_base = OTHER; note = thymine
  misc_feature 1..23: note = Description of Artificial Sequence: Synthetic oligonucleotide
  source 1..23: mol_type = other RNA
tgttgaaatggcacaattctttt

SEQ ID NO: 332 - RNA, 23 nt, synthetic construct
  modified_base 22..23: mod_base = OTHER; note = thymine
  misc_feature 1..23: note = Description of Artificial Sequence: Synthetic oligonucleotide
  source 1..23: mol_type = other RNA
aattttctgttgaaatggcactt

SEQ ID NO: 333 - RNA, 23 nt, synthetic construct
  modified_base 22..23: mod_base = OTHER; note = thymine
  misc_feature 1..23: note = Description of Artificial Sequence: Synthetic oligonucleotide
  source 1..23: mol_type = other RNA
aaattttctgttgaaatggcatt

SEQ ID NO: 334 - RNA, 23 nt, synthetic construct
  modified_base 22..23: mod_base = OTHER; note = thymine
  misc_feature 1..23: note = Description of Artificial Sequence: Synthetic oligonucleotide
  source 1..23: mol_type = other RNA
attagacaaggcaaagatgagtt

SEQ ID NO: 335 - RNA, 23 nt, synthetic construct
  modified_base 22..23: mod_base = OTHER; note = thymine
  misc_feature 1..23: note = Description of Artificial Sequence: Synthetic oligonucleotide
  source 1..23: mol_type = other RNA
acatttattgtttggaaaggttt

SEQ ID NO: 336 - RNA, 23 nt, synthetic construct
  modified_base 22..23: mod_base = OTHER; note = thymine
  misc_feature 1..23: note = Description of Artificial Sequence: Synthetic oligonucleotide
  source 1..23: mol_type = other RNA
atcacttacactgtcatagtctt

SEQ ID NO: 337 - RNA, 23 nt, synthetic construct
  modified_base 22..23: mod_base = OTHER; note = thymine
  misc_feature 1..23: note = Description of Artificial Sequence: Synthetic oligonucleotide
  source 1..23: mol_type = other RNA
tagattctatcacttacactgtt

SEQ ID NO: 338 - RNA, 23 nt, synthetic construct
  modified_base 22..23: mod_base = OTHER; note = thymine
  misc_feature 1..23: note = Description of Artificial Sequence: Synthetic oligonucleotide
  source 1..23: mol_type = other RNA
agtagattctatcacttacactt

SEQ ID NO: 339 - RNA, 23 nt, synthetic construct
  modified_base 22..23: mod_base = OTHER; note = thymine
  misc_feature 1..23: note = Description of Artificial Sequence: Synthetic oligonucleotide
  source 1..23: mol_type = other RNA
ttttgtgtgaagtagattctatt

SEQ ID NO: 340 - RNA, 23 nt, synthetic construct
  modified_base 22..23: mod_base = OTHER; note = thymine
  misc_feature 1..23: note = Description of Artificial Sequence: Synthetic oligonucleotide
  source 1..23: mol_type = other RNA
taaattttgtgtgaagtagattt

SEQ ID NO: 341 - RNA, 23 nt, synthetic construct
  modified_base 22..23: mod_base = OTHER; note = thymine
  misc_feature 1..23: note = Description of Artificial Sequence: Synthetic oligonucleotide
  source 1..23: mol_type = other RNA
tctagtaatccagtcaaaggctt

SEQ ID NO: 342 - RNA, 23 nt, synthetic construct
  modified_base 22..23: mod_base = OTHER; note = thymine
  misc_feature 1..23: note = Description of Artificial Sequence: Synthetic oligonucleotide
  source 1..23: mol_type = other RNA
aattcttctagtaatccagtctt

SEQ ID NO: 343 - RNA, 23 nt, synthetic construct
  modified_base 22..23: mod_base = OTHER; note = thymine
  misc_feature 1..23: note = Description of Artificial Sequence: Synthetic oligonucleotide
  source 1..23: mol_type = other RNA
taaattcttctagtaatccagtt

SEQ ID NO: 344 - RNA, 23 nt, synthetic construct
  modified_base 22..23: mod_base = OTHER; note = thymine
  misc_feature 1..23: note = Description of Artificial Sequence: Synthetic oligonucleotide
  source 1..23: mol_type = other RNA
ataaattcttctagtaatccatt

SEQ ID NO: 345 - RNA, 23 nt, synthetic construct
  modified_base 22..23: mod_base = OTHER; note = thymine
  misc_feature 1..23: note = Description of Artificial Sequence: Synthetic oligonucleotide
  source 1..23: mol_type = other RNA
atatactggccatagagagtctt

SEQ ID NO: 346 - RNA, 23 nt, synthetic construct
  modified_base 22..23: mod_base = OTHER; note = thymine
  misc_feature 1..23: note = Description of Artificial Sequence: Synthetic oligonucleotide
  source 1..23: mol_type = other RNA
ttctttgtgtgtacaagtcagtt

SEQ ID NO: 347 - RNA, 23 nt, synthetic construct
  modified_base 22..23: mod_base = OTHER; note = thymine
  misc_feature 1..23: note = Description of Artificial Sequence: Synthetic oligonucleotide
  source 1..23: mol_type = other RNA
aattctttgtgtgtacaagtctt

SEQ ID NO: 348 - RNA, 23 nt, synthetic construct
  modified_base 22..23: mod_base = OTHER; note = thymine
  misc_feature 1..23: note = Description of Artificial Sequence: Synthetic oligonucleotide
  source 1..23: mol_type = other RNA
tcggtaaattctttgtgtgtatt

SEQ ID NO: 349 - RNA, 23 nt, synthetic construct
  modified_base 22..23: mod_base = OTHER; note = thymine
  misc_feature 1..23: note = Description of Artificial Sequence: Synthetic oligonucleotide
  source 1..23: mol_type = other RNA
tgttacactgttgtttctggttt

SEQ ID NO: 350 - RNA, 23 nt, synthetic construct
  modified_base 22..23: mod_base = OTHER; note = thymine
  misc_feature 1..23: note = Description of Artificial Sequence: Synthetic oligonucleotide
  source 1..23: mol_type = other RNA
attgttacactgttgtttctgtt

SEQ ID NO: 351 - RNA, 23 nt, synthetic construct
  modified_base 22..23: mod_base = OTHER; note = thymine
  misc_feature 1..23: note = Description of Artificial Sequence: Synthetic oligonucleotide
  source 1..23: mol_type = other RNA
aaactgttcacaaggattgtttt

SEQ ID NO: 352 - RNA, 23 nt, synthetic construct
  modified_base 22..23: mod_base = OTHER; note = thymine
  misc_feature 1..23: note = Description of Artificial Sequence: Synthetic oligonucleotide
  source 1..23: mol_type = other RNA
acatcgttcaccattgtccactt

SEQ ID NO: 353 - RNA, 23 nt, synthetic construct
  modified_base 22..23: mod_base = OTHER; note = thymine
  misc_feature 1..23: note = Description of Artificial Sequence: Synthetic oligonucleotide
  source 1..23: mol_type = other RNA
tgttattgcacataaactccgtt

SEQ ID NO: 354 - RNA, 23 nt, synthetic construct
  modified_base 22..23: mod_base = OTHER; note = thymine
  misc_feature 1..23: note = Description of Artificial Sequence: Synthetic oligonucleotide
  source 1..23: mol_type = other RNA
tctgttattgcacataaactctt

SEQ ID NO: 355 - RNA, 23 nt, synthetic construct
  modified_base 22..23: mod_base = OTHER; note = thymine
  misc_feature 1..23: note = Description of Artificial Sequence: Synthetic oligonucleotide
  source 1..23: mol_type = other RNA
ttatgacattttgtgtatccatt

SEQ ID NO: 356 - RNA, 23 nt, synthetic construct
  modified_base 22..23: mod_base = OTHER; note = thymine
  misc_feature 1..23: note = Description of Artificial Sequence: Synthetic oligonucleotide
  source 1..23: mol_type = other RNA
tgaattatgacattttgtgtatt

SEQ ID NO: 357 - RNA, 23 nt, synthetic construct
  modified_base 22..23: mod_base = OTHER; note = thymine
  misc_feature 1..23: note = Description of Artificial Sequence: Synthetic oligonucleotide
  source 1..23: mol_type = other RNA
tttgaattatgacattttgtgtt

SEQ ID NO: 358 - RNA, 23 nt, synthetic construct
  modified_base 22..23: mod_base = OTHER; note = thymine
  misc_feature 1..23: note = Description of Artificial Sequence: Synthetic oligonucleotide
  source 1..23: mol_type = other RNA
tacaaatatttgaattatgactt

SEQ ID NO: 359 - RNA, 23 nt, synthetic construct
  modified_base 22..23: mod_base = OTHER; note = thymine
  misc_feature 1..23: note = Description of Artificial Sequence: Synthetic oligonucleotide
  source 1..23: mol_type = other RNA
aaataaacgcgaggaatacaatt

SEQ ID NO: 360 - RNA, 23 nt, synthetic construct
  modified_base 22..23: mod_base = OTHER; note = thymine
  misc_feature 1..23: note = Description of Artificial Sequence: Synthetic oligonucleotide
  source 1..23: mol_type = other RNA
aataagtagggttttcatcactt

SEQ ID NO: 361 - RNA, 23 nt, synthetic construct
  modified_base 22..23: mod_base = OTHER; note = thymine
  misc_feature 1..23: note = Description of Artificial Sequence: Synthetic oligonucleotide
  source 1..23: mol_type = other RNA
tcacaataccaatgttgaggatt

SEQ ID NO: 362 - RNA, 23 nt, synthetic construct
  modified_base 22..23: mod_base = OTHER; note = thymine
  misc_feature 1..23: note = Description of Artificial Sequence: Synthetic oligonucleotide
  source 1..23: mol_type = other RNA
tgtttcttgatcacaataccatt

SEQ ID NO: 363 - RNA, 23 nt, synthetic construct
  modified_base 22..23: mod_base = OTHER; note = thymine
  misc_feature 1..23: note = Description of Artificial Sequence: Synthetic oligonucleotide
  source 1..23: mol_type = other RNA
aacaatctgtttcttgatcactt

SEQ ID NO: 364 - RNA, 23 nt, synthetic construct
  modified_base 22..23: mod_base = OTHER; note = thymine
  misc_feature 1..23: note = Description of Artificial Sequence: Synthetic oligonucleotide
  source 1..23: mol_type = other RNA
tttacacagagaaactcggaatt

SEQ ID NO: 365 - RNA, 23 nt, synthetic construct
  modified_base 22..23: mod_base = OTHER; note = thymine
  misc_feature 1..23: note = Description of Artificial Sequence: Synthetic oligonucleotide
  source 1..23: mol_type = other RNA
atttacacagagaaactcggatt

SEQ ID NO: 366 - RNA, 23 nt, synthetic construct
  modified_base 22..23: mod_base = OTHER; note = thymine
  misc_feature 1..23: note = Description of Artificial Sequence: Synthetic oligonucleotide
  source 1..23: mol_type = other RNA
ttctgattctcatcgtagccgtt

SEQ ID NO: 367 - RNA, 23 nt, synthetic construct
  modified_base 22..23: mod_base = OTHER; note = thymine
  misc_feature 1..23: note = Description of Artificial Sequence: Synthetic oligonucleotide
  source 1..23: mol_type = other RNA
attttcagagcaagttctccttt

SEQ ID NO: 368 - RNA, 23 nt, synthetic construct
  modified_base 22..23: mod_base = OTHER; note = thymine
  misc_feature 1..23: note = Description of Artificial Sequence: Synthetic oligonucleotide
  source 1..23: mol_type = other RNA
atatctttgggatacacagtctt

SEQ ID NO: 369 - RNA, 23 nt, synthetic construct
  modified_base 22..23: mod_base = OTHER; note = thymine
  misc_feature 1..23: note = Description of Artificial Sequence: Synthetic oligonucleotide
  source 1..23: mol_type = other RNA
aggtaaactgattctgttggctt

SEQ ID NO: 370 - RNA, 23 nt, synthetic construct
  modified_base 22..23: mod_base = OTHER; note = thymine
  misc_feature 1..23: note = Description of Artificial Sequence: Synthetic oligonucleotide
  source 1..23: mol_type = other RNA
atagaaactggttaaggtgtctt

SEQ ID NO: 371 - RNA, 23 nt, synthetic construct
  modified_base 22..23: mod_base = OTHER; note = thymine
  misc_feature 1..23: note = Description of Artificial Sequence: Synthetic oligonucleotide
  source 1..23: mol_type = other RNA
acaatagaaactggttaaggttt

SEQ ID NO: 372 - RNA, 23 nt, synthetic construct
  modified_base 22..23: mod_base = OTHER; note = thymine
  misc_feature 1..23: note = Description of Artificial Sequence: Synthetic oligonucleotide
  source 1..23: mol_type = other RNA
tcatcaatatcaacacaagtctt

SEQ ID NO: 373 - RNA, 23 nt, synthetic construct
  modified_base 22..23: mod_base = OTHER; note = thymine
  misc_feature 1..23: note = Description of Artificial Sequence: Synthetic oligonucleotide
  source 1..23: mol_type = other RNA
agatgtaggagcctattacattt

SEQ ID NO: 374 - RNA, 23 nt, synthetic construct
  modified_base 22..23: mod_base = OTHER; note = thymine
  misc_feature 1..23: note = Description of Artificial Sequence: Synthetic oligonucleotide
  source 1..23: mol_type = other RNA
tcgatgttactgttttgccggtt

SEQ ID NO: 375 - RNA, 23 nt, synthetic construct
  modified_base 22..23: mod_base = OTHER; note = thymine
  misc_feature 1..23: note = Description of Artificial Sequence: Synthetic oligonucleotide
  source 1..23: mol_type = other RNA
ttgctaaaaatgagatagggttt

SEQ ID NO: 376 - RNA, 23 nt, synthetic construct
  modified_base 22..23: mod_base = OTHER; note = thymine
  misc_feature 1..23: note = Description of Artificial Sequence: Synthetic oligonucleotide
  source 1..23: mol_type = other RNA
atttctcaaatagtaacggtttt

SEQ ID NO: 377 - RNA, 23 nt, synthetic construct
  modified_base 22..23: mod_base = OTHER; note = thymine
  misc_feature 1..23: note = Description of Artificial Sequence: Synthetic oligonucleotide
  source 1..23: mol_type = other RNA
aatttctcaaatagtaacggttt

SEQ ID NO: 378 - RNA, 23 nt, synthetic construct
  modified_base 22..23: mod_base = OTHER; note = thymine
  misc_feature 1..23: note = Description of Artificial Sequence: Synthetic oligonucleotide
  source 1..23: mol_type = other RNA
aaatttctcaaatagtaacggtt

SEQ ID NO: 379 - RNA, 23 nt, synthetic construct
  modified_base 22..23: mod_base = OTHER; note = thymine
  misc_feature 1..23: note = Description of Artificial Sequence: Synthetic oligonucleotide
  source 1..23: mol_type = other RNA
agttaaatttctcaaatagtatt

SEQ ID NO: 380 - RNA, 23 nt, synthetic construct
  modified_base 22..23: mod_base = OTHER; note = thymine
  misc_feature 1..23: note = Description of Artificial Sequence: Synthetic oligonucleotide
  source 1..23: mol_type = other RNA
atctatagttaaatttctcaatt

SEQ ID NO: 381 - RNA, 23 nt, synthetic construct
  modified_base 22..23: mod_base = OTHER; note = thymine
  misc_feature 1..23: note = Description of Artificial Sequence: Synthetic oligonucleotide
  source 1..23: mol_type = other RNA
taaaaatagccatctatagtttt

SEQ ID NO: 382 - RNA, 23 nt, synthetic construct
  modified_base 22..23: mod_base = OTHER; note = thymine
  misc_feature 1..23: note = Description of Artificial Sequence: Synthetic oligonucleotide
  source 1..23: mol_type = other RNA
atctaatgccacaacattgtctt

SEQ ID NO: 383 - RNA, 23 nt, synthetic construct
  modified_base 22..23: mod_base = OTHER; note = thymine
  misc_feature 1..23: note = Description of Artificial Sequence: Synthetic oligonucleotide
  source 1..23: mol_type = other RNA
aatccaatacaatctcttctctt

SEQ ID NO: 384 - RNA, 23 nt, synthetic construct
  modified_base 22..23: mod_base = OTHER; note = thymine
  misc_feature 1..23: note = Description of Artificial Sequence: Synthetic oligonucleotide
  source 1..23: mol_type = other RNA
acattctctcaatgacttgcctt

SEQ ID NO: 385 - RNA, 23 nt, synthetic construct
  modified_base 22..23: mod_base = OTHER; note = thymine
  misc_feature 1..23: note = Description of Artificial Sequence: Synthetic oligonucleotide
  source 1..23: mol_type = other RNA
atgattgtctccttgtttgtctt

SEQ ID NO: 386 - RNA, 23 nt, synthetic construct
  modified_base 22..23: mod_base = OTHER; note = thymine
  misc_feature 1..23: note = Description of Artificial Sequence: Synthetic oligonucleotide
  source 1..23: mol_type = other RNA
attatcacagacttgttggtttt

SEQ ID NO: 387 - RNA, 23 nt, synthetic construct
  modified_base 22..23: mod_base = OTHER; note = thymine
  misc_feature 1..23: note = Description of Artificial Sequence: Synthetic oligonucleotide
  source 1..23: mol_type = other RNA
ttcaaaaatggtaatagcgaatt

SEQ ID NO: 388 - RNA, 23 nt, synthetic construct
  modified_base 22..23: mod_base = OTHER; note = thymine
  misc_feature 1..23: note = Description of Artificial Sequence: Synthetic oligonucleotide
  source 1..23: mol_type = other RNA
tcttcaaaaatggtaatagcgtt

SEQ ID NO: 389 - RNA, 23 nt, synthetic construct
  modified_base 22..23: mod_base = OTHER; note = thymine
  misc_feature 1..23: note = Description of Artificial Sequence: Synthetic oligonucleotide
  source 1..23: mol_type = other RNA
atttgtttcccttttccactgtt

SEQ ID NO: 390 - RNA, 23 nt, synthetic construct
  modified_base 22..23: mod_base = OTHER; note = thymine
  misc_feature 1..23: note = Description of Artificial Sequence: Synthetic oligonucleotide
  source 1..23: mol_type = other RNA
atttgatccatcatatttgtttt

SEQ ID NO: 391 - RNA, 23 nt, synthetic construct
  modified_base 22..23: mod_base = OTHER; note = thymine
  misc_feature 1..23: note = Description of Artificial Sequence: Synthetic oligonucleotide
  source 1..23: mol_type = other RNA
tatatggatggtacacatggatt

SEQ ID NO: 392 - RNA, 23 nt, synthetic construct
  modified_base 22..23: mod_base = OTHER; note = thymine
  misc_feature 1..23: note = Description of Artificial Sequence: Synthetic oligonucleotide
  source 1..23: mol_type = other RNA
aaagaagacggtcttcatcagtt

SEQ ID NO: 393 - RNA, 23 nt, synthetic construct
  modified_base 22..23: mod_base = OTHER; note = thymine
  misc_feature 1..23: note = Description of Artificial Sequence: Synthetic oligonucleotide
  source 1..23: mol_type = other RNA
tgaattctgtgaagttgtcactt

SEQ ID NO: 394 - RNA, 23 nt, synthetic construct
  modified_base 22..23: mod_base = OTHER; note = thymine
  misc_feature 1..23: note = Description of Artificial Sequence: Synthetic oligonucleotide
  source 1..23: mol_type = other RNA
acaatgtccacttgtacactgtt

SEQ ID NO: 395 - RNA, 23 nt, synthetic construct
  modified_base 22..23: mod_base = OTHER; note = thymine
  misc_feature 1..23: note = Description of Artificial Sequence: Synthetic oligonucleotide
  source 1..23: mol_type = other RNA
acacaatgtccacttgtacactt

SEQ ID NO: 396 - RNA, 23 nt, synthetic construct
  modified_base 22..23: mod_base = OTHER; note = thymine
  misc_feature 1..23: note = Description of Artificial Sequence: Synthetic oligonucleotide
  source 1..23: mol_type = other RNA
tttttgcattcgaacatagtatt

SEQ ID NO: 397 - RNA, 23 nt, synthetic construct
  modified_base 22..23: mod_base = OTHER; note = thymine
  misc_feature 1..23: note = Description of Artificial Sequence: Synthetic oligonucleotide
  source 1..23: mol_type = other RNA
atggtttttgcattcgaacattt

SEQ ID NO: 398 - RNA, 23 nt, synthetic construct
  modified_base 22..23: mod_base = OTHER; note = thymine
  misc_feature 1..23: note = Description of Artificial Sequence: Synthetic oligonucleotide
  source 1..23: mol_type = other RNA
atacaaacatggtttttgcattt

SEQ ID NO: 399 - RNA, 23 nt, synthetic construct
  modified_base 22..23: mod_base = OTHER; note = thymine
  misc_feature 1..23: note = Description of Artificial Sequence: Synthetic oligonucleotide
  source 1..23: mol_type = other RNA
atcacatttccaatatggcggtt

SEQ ID NO: 400 - RNA, 23 nt, synthetic construct
  modified_base 22..23: mod_base = OTHER; note = thymine
  misc_feature 1..23: note = Description of Artificial Sequence: Synthetic oligonucleotide
  source 1..23: mol_type = other RNA
tgaagttcttcatctgaaccatt

SEQ ID NO: 401 - RNA, 23 nt, synthetic construct
  modified_base 22..23: mod_base = OTHER; note = thymine
  misc_feature 1..23: note = Description of Artificial Sequence: Synthetic oligonucleotide
  source 1..23: mol_type = other RNA
ataaatgcagcgattgttgtctt

SEQ ID NO: 402 - RNA, 23 nt, synthetic construct
  modified_base 22..23: mod_base = OTHER; note = thymine
  misc_feature 1..23: note = Description of Artificial Sequence: Synthetic oligonucleotide
  source 1..23: mol_type = other RNA
attctgtacaaggtttaggggtt

SEQ ID NO: 403 - RNA, 23 nt, synthetic construct
  modified_base 22..23: mod_base = OTHER; note = thymine
  misc_feature 1..23: note = Description of Artificial Sequence: Synthetic oligonucleotide
  source 1..23: mol_type = other RNA
tattctgtacaaggtttagggtt

SEQ ID NO: 404 - RNA, 23 nt, synthetic construct
  modified_base 22..23: mod_base = OTHER; note = thymine
  misc_feature 1..23: note = Description of Artificial Sequence: Synthetic oligonucleotide
  source 1..23: mol_type = other RNA
attcatattctgtacaaggtttt

SEQ ID NO: 405 - RNA, 23 nt, synthetic construct
  modified_base 22..23: mod_base = OTHER; note = thymine
  misc_feature 1..23: note = Description of Artificial Sequence: Synthetic oligonucleotide
  source 1..23: mol_type = other RNA
tattcatattctgtacaaggttt

SEQ ID NO: 406 - RNA, 23 nt, synthetic construct
  modified_base 22..23: mod_base = OTHER; note = thymine
  misc_feature 1..23: note = Description of Artificial Sequence: Synthetic oligonucleotide
  source 1..23: mol_type = other RNA
ttatattcatattctgtacaatt

SEQ ID NO: 407 - RNA, 23 nt, synthetic construct
  modified_base 22..23: mod_base = OTHER; note = thymine
  misc_feature 1..23: note = Description of Artificial Sequence: Synthetic oligonucleotide
  source 1..23: mol_type = other RNA
tattgcaacccagttcatcggtt

SEQ ID NO: 408 - RNA, 23 nt, synthetic construct
  modified_base 22..23: mod_base = OTHER; note = thymine
  misc_feature 1..23: note = Description of Artificial Sequence: Synthetic oligonucleotide
  source 1..23: mol_type = other RNA
atattttcagcacatgttctttt

SEQ ID NO: 409 - RNA, 23 nt, synthetic construct
  modified_base 22..23: mod_base = OTHER; note = thymine
  misc_feature 1..23: note = Description of Artificial Sequence: Synthetic oligonucleotide
  source 1..23: mol_type = other RNA
ttaattgggtacaattttgcttt

SEQ ID NO: 410 - RNA, 23 nt, synthetic construct
  modified_base 22..23: mod_base = OTHER; note = thymine
  misc_feature 1..23: note = Description of Artificial Sequence: Synthetic oligonucleotide
  source 1..23: mol_type = other RNA
aaaaacattggtttcgaaccctt

SEQ ID NO: 411 - RNA, 23 nt, synthetic construct
  modified_base 22..23: mod_base = OTHER; note = thymine
  misc_feature 1..23: note = Description of Artificial Sequence: Synthetic oligonucleotide
  source 1..23: mol_type = other RNA
tgtcaaaaacattggtttcgatt

SEQ ID NO: 412 - RNA, 23 nt, synthetic construct
  modified_base 22..23: mod_base = OTHER; note = thymine
  misc_feature 1..23: note = Description of Artificial Sequence: Synthetic oligonucleotide
  source 1..23: mol_type = other RNA
ttcgaattcggacattgtcagtt

SEQ ID NO: 413 - RNA, 23 nt, synthetic construct
  modified_base 22..23: mod_base = OTHER; note = thymine
  misc_feature 1..23: note = Description of Artificial Sequence: Synthetic oligonucleotide
  source 1..23: mol_type = other RNA
attatattttcgaattcggactt

SEQ ID NO: 414 - RNA, 23 nt, synthetic construct
  modified_base 22..23: mod_base = OTHER; note = thymine
  misc_feature 1..23: note = Description of Artificial Sequence: Synthetic oligonucleotide
  source 1..23: mol_type = other RNA
agattatattttcgaattcggtt

SEQ ID NO: 415 - RNA, 23 nt, synthetic construct
  modified_base 22..23: mod_base = OTHER; note = thymine
  misc_feature 1..23: note = Description of Artificial Sequence: Synthetic oligonucleotide
  source 1..23: mol_type = other RNA
tcatcttgaagatactctgagtt

SEQ ID NO: 416 - RNA, 23 nt, synthetic construct
  modified_base 22..23: mod_base = OTHER; note = thymine
  misc_feature 1..23: note = Description of Artificial Sequence: Synthetic oligonucleotide
  source 1..23: mol_type = other RNA
tatattcctcatcttgaagattt

SEQ ID NO: 417 - RNA, 27 nt, synthetic construct
  modified_base 26..27: mod_base = OTHER; note = thymine
  misc_feature 1..27: note = Description of Artificial Sequence: Synthetic oligonucleotide
  source 1..27: mol_type = other RNA
tttgatagcaccaaacctagagccctt

SEQ ID NO: 418 - RNA, 27 nt, synthetic construct
  modified_base 26..27: mod_base = OTHER; note = thymine
  misc_feature 1..27: note = Description of Artificial Sequence: Synthetic oligonucleotide
  source 1..27: mol_type = other RNA
tttgatagcaccaaacctagagccctt

SEQ ID NO: 419 - RNA, 27 nt, synthetic construct
  modified_base 26..27: mod_base = OTHER; note = thymine
  misc_feature 1..27: note = Description of Artificial Sequence: Synthetic oligonucleotide
  source 1..27: mol_type = other RNA
tttgatagcaccaaacctagagccctt

SEQ ID NO: 420 - RNA, 27 nt, synthetic construct
  modified_base 26..27: mod_base = OTHER; note = thymine
  misc_feature 1..27: note = Description of Artificial Sequence: Synthetic oligonucleotide
  source 1..27: mol_type = other RNA
tttgatagcaccaaacctagagccctt

SEQ ID NO: 421 - RNA, 25 nt, synthetic construct
  misc_feature 1..25: note = Description of Artificial Sequence: Synthetic oligonucleotide
  source 1..25: mol_type = other RNA
tttgatagcaccaaacctagagccc

SEQ ID NO: 422 - RNA, 25 nt, synthetic construct
  misc_feature 1..25: note = Description of Artificial Sequence: Synthetic oligonucleotide
  source 1..25: mol_type = other RNA
tttgatagcaccaaacctagagccc

SEQ ID NO: 423 - RNA, 27 nt, synthetic construct
  modified_base 26..27: mod_base = OTHER; note = thymine
  misc_feature 1..27: note = Description of Artificial Sequence: Synthetic oligonucleotide
  source 1..27: mol_type = other RNA
tttgatagcaccaaacctagagccctt

SEQ ID NO: 424 - RNA, 27 nt, synthetic construct
  modified_base 26..27: mod_base = OTHER; note = thymine
  misc_feature 1..27: note = Description of Artificial Sequence: Synthetic oligonucleotide
  source 1..27: mol_type = other RNA
tttgatagcaccaaacctagagccctt

SEQ ID NO: 425 - RNA, 25 nt, synthetic construct
  misc_feature 1..25: note = Description of Artificial Sequence: Synthetic oligonucleotide
  source 1..25: mol_type = other RNA
tttgatagcaccaaacctagagccc

SEQ ID NO: 426 - RNA, 27 nt, synthetic construct
  modified_base 26..27: mod_base = OTHER; note = thymine
  misc_feature 1..27: note = Description of Artificial Sequence: Synthetic oligonucleotide
  source 1..27: mol_type = other RNA
tttgatagcaccaaacctagagccctt

SEQ ID NO: 427 - RNA, 25 nt, synthetic construct
  misc_feature 1..25: note = Description of Artificial Sequence: Synthetic oligonucleotide
  source 1..25: mol_type = other RNA
tttgatagcaccaaacctagacccc

SEQ ID NO: 428 - RNA, 27 nt, synthetic construct
  modified_base 26..27: mod_base = OTHER; note = thymine
  misc_feature 1..27: note = Description of Artificial Sequence: Synthetic oligonucleotide
  source 1..27: mol_type = other RNA
tttgatagcaccaaacctagagccctt

SEQ ID NO: 429 - RNA, 25 nt, synthetic construct
  misc_feature 1..25: note = Description of Artificial Sequence: Synthetic oligonucleotide
  source 1..25: mol_type = other RNA
tatcaaacctcgatagcaacaccgc

SEQ ID NO: 430 - RNA, 27 nt, synthetic construct
  modified_base 26..27: mod_base = OTHER; note = thymine
  misc_feature 1..27: note = Description of Artificial Sequence: Synthetic oligonucleotide
  source 1..27: mol_type = other RNA
tttgatagcaccaaacctagagccctt

SEQ ID NO: 431 - RNA, 27 nt, synthetic construct
  modified_base 26..27: mod_base = OTHER; note = thymine
  misc_feature 1..27: note = Description of Artificial Sequence: Synthetic oligonucleotide
  source 1..27: mol_type = other RNA
tttgatagcaccaaacctagagccctt

SEQ ID NO: 432 - RNA, 27 nt, synthetic construct
  modified_base 26..27: mod_base = OTHER; note = thymine
  misc_feature 1..27: note = Description of Artificial Sequence: Synthetic oligonucleotide
  source 1..27: mol_type = other RNA
tttgatagcaccaaacctagagccctt

SEQ ID NO: 433 - RNA, 23 nt, synthetic construct
  misc_feature 1..23: note = Description of Artificial Sequence: Synthetic oligonucleotide
  source 1..23: mol_type = other RNA
tttgatagcaccaaacctagagc

SEQ ID NO: 434 - RNA, 23 nt, synthetic construct
  misc_feature 1..23: note = Description of Artificial Sequence: Synthetic oligonucleotide
  source 1..23: mol_type = other RNA
tttgatagcaccaaacctagagc

SEQ ID NO: 435 - RNA, 23 nt, synthetic construct
  modified_base 22..23: mod_base = OTHER; note = thymine
  misc_feature 1..23: note = Description of Artificial Sequence: Synthetic oligonucleotide
  source 1..23: mol_type = other RNA
tcaaagttggggatgtaggcatt

SEQ ID NO: 436 - RNA, 23 nt, synthetic construct
  modified_base 22..23: mod_base = OTHER; note = thymine
  misc_feature 1..23: note = Description of Artificial Sequence: Synthetic oligonucleotide
  source 1..23: mol_type = other RNA
tcagtttcaggtcaacttccttt

SEQ ID NO: 437 - RNA, 23 nt, synthetic construct
  modified_base 22..23: mod_base = OTHER; note = thymine
  misc_feature 1..23: note = Description of Artificial Sequence: Synthetic oligonucleotide
  source 1..23: mol_type = other RNA
tacgtatttcagtttcaggtctt

SEQ ID NO: 438 - RNA, 23 nt, synthetic construct
  modified_base 22..23: mod_base = OTHER; note = thymine
  misc_feature 1..23: note = Description of Artificial Sequence: Synthetic oligonucleotide
  source 1..23: mol_type = other RNA
ttacgtatttcagtttcaggttt

SEQ ID NO: 439 - RNA, 23 nt, synthetic construct
  modified_base 22..23: mod_base = OTHER; note = thymine
  misc_feature 1..23: note = Description of Artificial Sequence: Synthetic oligonucleotide
  source 1..23: mol_type = other RNA
agtttagccacctcaatgcgttt

SEQ ID NO: 440 - RNA, 23 nt, synthetic construct
  modified_base 22..23: mod_base = OTHER; note = thymine
  misc_feature 1..23: note = Description of Artificial Sequence: Synthetic oligonucleotide
  source 1..23: mol_type = other RNA
aacataagccctagtttgggatt

SEQ ID NO: 441 - RNA, 23 nt, synthetic construct
  modified_base 22..23: mod_base = OTHER; note = thymine
  misc_feature 1..23: note = Description of Artificial Sequence: Synthetic oligonucleotide
  source 1..23: mol_type = other RNA
tcgattttaggttcctttccctt

SEQ ID NO: 442 - RNA, 23 nt, synthetic construct
  modified_base 22..23: mod_base = OTHER; note = thymine
  misc_feature 1..23: note = Description of Artificial Sequence: Synthetic oligonucleotide
  source 1..23: mol_type = other RNA
tcgaaaaccaggatgttgcggtt

SEQ ID NO: 443 - RNA, 23 nt, synthetic construct
  modified_base 22..23: mod_base = OTHER; note = thymine
  misc_feature 1..23: note = Description of Artificial Sequence: Synthetic oligonucleotide
  source 1..23: mol_type = other RNA
tcaaataatcgatagaaaggctt

SEQ ID NO: 444 - RNA, 23 nt, synthetic construct
  modified_base 22..23: mod_base = OTHER; note = thymine
  misc_feature 1..23: note = Description of Artificial Sequence: Synthetic oligonucleotide
  source 1..23: mol_type = other RNA
ttgttcaaataatcgatagaatt

SEQ ID NO: 445 - RNA, 23 nt, synthetic construct
  modified_base 22..23: mod_base = OTHER; note = thymine
  misc_feature 1..23: note = Description of Artificial Sequence: Synthetic oligonucleotide
  source 1..23: mol_type = other RNA
ttatggtttcaataacgtccttt

SEQ ID NO: 446 - RNA, 23 nt, synthetic construct
  modified_base 22..23: mod_base = OTHER; note = thymine
  misc_feature 1..23: note = Description of Artificial Sequence: Synthetic oligonucleotide
  source 1..23: mol_type = other RNA
ttttatggtttcaataacgtctt

SEQ ID NO: 447 - RNA, 23 nt, synthetic construct
  modified_base 22..23: mod_base = OTHER; note = thymine
  misc_feature 1..23: note = Description of Artificial Sequence: Synthetic oligonucleotide
  source 1..23: mol_type = other RNA
attttatggtttcaataacgttt

SEQ ID NO: 448 - RNA, 27 nt, synthetic construct
  modified_base 26..27: mod_base = OTHER; note = thymine
  misc_feature 1..27: note = Description of Artificial Sequence: Synthetic oligonucleotide
  source 1..27: mol_type = other RNA
tttgcaatgactctcctatcagtcctt

SEQ ID NO: 449 - RNA, 27 nt, synthetic construct
  modified_base 26..27: mod_base = OTHER; note = thymine
  misc_feature 1..27: note = Description of Artificial Sequence: Synthetic oligonucleotide
  source 1..27: mol_type = other RNA
tttgcaatgactctcctatcagtcctt

SEQ ID NO: 450 - RNA, 27 nt, synthetic construct
  modified_base 26..27: mod_base = OTHER; note = thymine
  misc_feature 1..27: note = Description of Artificial Sequence: Synthetic oligonucleotide
  source 1..27: mol_type = other RNA
tttgcaatgactctcctatcagtcctt

SEQ ID NO: 451 - RNA, 27 nt, synthetic construct
  modified_base 26..27: mod_base = OTHER; note = thymine
  misc_feature 1..27: note = Description of Artificial Sequence: Synthetic oligonucleotide
  source 1..27: mol_type = other RNA
tttgcaatgactctcctatcagtcctt

SEQ ID NO: 452 - RNA, 25 nt, synthetic construct
  misc_feature 1..25: note = Description of Artificial Sequence: Synthetic oligonucleotide
  source 1..25: mol_type = other RNA
tttgcaatgactctcctatcagtcc

SEQ ID NO: 453 - RNA, 25 nt, synthetic construct
  misc_feature 1..25: note = Description of Artificial Sequence: Synthetic oligonucleotide
  source 1..25: mol_type = other RNA
tttgcaatgactctcctatcagtcc

SEQ ID NO: 454 - RNA, 27 nt, synthetic construct
  modified_base 26..27: mod_base = OTHER; note = thymine
  misc_feature 1..27: note = Description of Artificial Sequence: Synthetic oligonucleotide
  source 1..27: mol_type = other RNA
tttgcaatgactctcctatcagtcctt

SEQ ID NO: 455 - RNA, 27 nt, synthetic construct
  modified_base 26..27: mod_base = OTHER; note = thymine
  misc_feature 1..27: note = Description of Artificial Sequence: Synthetic oligonucleotide
  source 1..27: mol_type = other RNA
tttgcaatgactctcctatcagtcctt

SEQ ID NO: 456 - RNA, 25 nt, synthetic construct
  misc_feature 1..25: note = Description of Artificial Sequence: Synthetic oligonucleotide
  source 1..25: mol_type = other RNA
tttgcaatgactctcctatcagtcc

SEQ ID NO: 457 - RNA, 27 nt, synthetic construct
  modified_base 26..27: mod_base = OTHER; note = thymine
  misc_feature 1..27: note = Description of Artificial Sequence: Synthetic oligonucleotide
  source 1..27: mol_type = other RNA
tttgcaatgactctcctatcagtcctt

SEQ ID NO: 458 - RNA, 25 nt, synthetic construct
  misc_feature 1..25: note = Description of Artificial Sequence: Synthetic oligonucleotide
  source 1..25: mol_type = other RNA
tttgcaatgactctcctatcactcc

SEQ ID NO: 459 - RNA, 27 nt, synthetic construct
  modified_base 26..27: mod_base = OTHER; note = thymine
  misc_feature 1..27: note = Description of Artificial Sequence: Synthetic oligonucleotide
  source 1..27: mol_type = other RNA
tttgcaatgactctcctatcagtcctt

SEQ ID NO: 460 - RNA, 25 nt, synthetic construct
  misc_feature 1..25: note = Description of Artificial Sequence: Synthetic oligonucleotide
  source 1..25: mol_type = other RNA
tatcctaagtcacacgtttgactgc

SEQ ID NO: 461 - RNA, 27 nt, synthetic construct
  modified_base 26..27: mod_base = OTHER; note = thymine
  misc_feature 1..27: note = Description of Artificial Sequence: Synthetic oligonucleotide
  source 1..27: mol_type = other RNA
tttgcaatgactctcctatcagtcctt

SEQ ID NO: 462 - RNA, 27 nt, synthetic construct
  modified_base 26..27: mod_base = OTHER; note = thymine
  misc_feature 1..27: note = Description of Artificial Sequence: Synthetic oligonucleotide
  source 1..27: mol_type = other RNA
tttgcaatgactctcctatcagtcctt

SEQ ID NO: 463 - RNA, 27 nt, synthetic construct
  modified_base 26..27: mod_base = OTHER; note = thymine
  misc_feature 1..27: note = Description of Artificial Sequence: Synthetic oligonucleotide
  source 1..27: mol_type = other RNA
tttgcaatgactctcctatcagtcctt

SEQ ID NO: 464 - RNA, 23 nt, synthetic construct
  misc_feature 1..23: note = Description of Artificial Sequence: Synthetic oligonucleotide
  source 1..23: mol_type = other RNA
tttgcaatgactctcctatcagt

SEQ ID NO: 465 - RNA, 23 nt, synthetic construct
  misc_feature 1..23: note = Description of Artificial Sequence: Synthetic oligonucleotide
  source 1..23: mol_type = other RNA
tttgcaatgactctcctatcagt

SEQ ID NO: 466 - RNA, 23 nt, synthetic construct
  modified_base 22..23: mod_base = OTHER; note = thymine
  misc_feature 1..23: note = Description of Artificial Sequence: Synthetic oligonucleotide
  source 1..23: mol_type = other RNA
tagatatccagtataactggttt

SEQ ID NO: 467 - RNA, 23 nt, synthetic construct
  modified_base 22..23: mod_base = OTHER; note = thymine
  misc_feature 1..23: note = Description of Artificial Sequence: Synthetic oligonucleotide
  source 1..23: mol_type = other RNA
ttttgtttccatacttctccctt

SEQ ID NO: 468 - RNA, 23 nt, synthetic construct
  modified_base 22..23: mod_base = OTHER; note = thymine
  misc_feature 1..23: note = Description of Artificial Sequence: Synthetic oligonucleotide
  source 1..23: mol_type = other RNA
atttattttgtttccatactttt

SEQ ID NO: 469 - RNA, 23 nt, synthetic construct
  modified_base 22..23: mod_base = OTHER; note = thymine
  misc_feature 1..23: note = Description of Artificial Sequence: Synthetic oligonucleotide
  source 1..23: mol_type = other RNA
tattgtatctgagttgatgaatt

SEQ ID NO: 470 - RNA, 23 nt, synthetic construct
  modified_base 22..23: mod_base = OTHER; note = thymine
  misc_feature 1..23: note = Description of Artificial Sequence: Synthetic oligonucleotide
  source 1..23: mol_type = other RNA
tcaaaatagcaatttcctccgtt

SEQ ID NO: 471 - RNA, 23 nt, synthetic construct
  modified_base 22..23: mod_base = OTHER; note = thymine
  misc_feature 1..23: note = Description of Artificial Sequence: Synthetic oligonucleotide
  source 1..23: mol_type = other RNA
tcatcaaaatagcaatttccttt

SEQ ID NO: 472 - RNA, 23 nt, synthetic construct
  modified_base 22..23: mod_base = OTHER; note = thymine
  misc_feature 1..23: note = Description of Artificial Sequence: Synthetic oligonucleotide
  source 1..23: mol_type = other RNA
atttcacaatattttccggtgtt

SEQ ID NO: 473 - RNA, 23 nt, synthetic construct
  modified_base 22..23: mod_base = OTHER; note = thymine
  misc_feature 1..23: note = Description of Artificial Sequence: Synthetic oligonucleotide
  source 1..23: mol_type = other RNA
tttgaaaacgccatttcacaatt

SEQ ID NO: 474 - RNA, 23 nt, synthetic construct
  modified_base 22..23: mod_base = OTHER; note = thymine
  misc_feature 1..23: note = Description of Artificial Sequence: Synthetic oligonucleotide
  source 1..23: mol_type = other RNA
ttctatagtggaagaatcctgtt

SEQ ID NO: 475 - RNA, 23 nt, synthetic construct
  modified_base 22..23: mod_base = OTHER; note = thymine
  misc_feature 1..23: note = Description of Artificial Sequence: Synthetic oligonucleotide
  source 1..23: mol_type = other RNA
atatccatgttaagatctgcctt

SEQ ID NO: 476 - RNA, 23 nt, synthetic construct
  modified_base 22..23: mod_base = OTHER; note = thymine
  misc_feature 1..23: note = Description of Artificial Sequence: Synthetic oligonucleotide
  source 1..23: mol_type = other RNA
acaaagtcttcactcattgcctt

SEQ ID NO: 477 - RNA, 23 nt, synthetic construct
  modified_base 22..23: mod_base = OTHER; note = thymine
  misc_feature 1..23: note = Description of Artificial Sequence: Synthetic oligonucleotide
  source 1..23: mol_type = other RNA
ttattatccacattttcagattt

SEQ ID NO: 478 - RNA, 23 nt, synthetic construct
  modified_base 22..23: mod_base = OTHER; note = thymine
  misc_feature 1..23: note = Description of Artificial Sequence: Synthetic oligonucleotide
  source 1..23: mol_type = other RNA
tcttattatccacattttcagtt

SEQ ID NO: 479 - RNA, 23 nt, synthetic construct
  modified_base 22..23: mod_base = OTHER; note = thymine
  misc_feature 1..23: note = Description of Artificial Sequence: Synthetic oligonucleotide
  source 1..23: mol_type = other RNA
tccataattcttattatccactt

SEQ ID NO: 480 - RNA, 23 nt, synthetic construct
  modified_base 22..23: mod_base = OTHER; note = thymine
  misc_feature 1..23: note = Description of Artificial Sequence: Synthetic oligonucleotide
  source 1..23: mol_type = other RNA
ttccataattcttattatccatt

SEQ ID NO: 481 - RNA, 23 nt, synthetic construct
  modified_base 22..23: mod_base = OTHER; note = thymine
  misc_feature 1..23: note = Description of Artificial Sequence: Synthetic oligonucleotide
  source 1..23: mol_type = other RNA
ttttcgtttgaagagattccatt

SEQ ID NO: 482 - RNA, 23 nt, synthetic construct
  modified_base 22..23: mod_base = OTHER; note = thymine
  misc_feature 1..23: note = Description of Artificial Sequence: Synthetic oligonucleotide
  source 1..23: mol_type = other RNA
tagattttcgtttgaagagattt

SEQ ID NO: 483 - RNA, 23 nt, synthetic construct
  modified_base 22..23: mod_base = OTHER; note = thymine
  misc_feature 1..23: note = Description of Artificial Sequence: Synthetic oligonucleotide
  source 1..23: mol_type = other RNA
tttagattttcgtttgaagagtt

SEQ ID NO: 484 - RNA, 23 nt, synthetic construct
  modified_base 22..23: mod_base = OTHER; note = thymine
  misc_feature 1..23: note = Description of Artificial Sequence: Synthetic oligonucleotide
  source 1..23: mol_type = other RNA
ttgtttagattttcgtttgaatt

SEQ ID NO: 485 - RNA, 23 nt, synthetic construct
  modified_base 22..23: mod_base = OTHER; note = thymine
  misc_feature 1..23: note = Description of Artificial Sequence: Synthetic oligonucleotide
  source 1..23: mol_type = other RNA
tagtttgtttagattttcgtttt

SEQ ID NO: 486 - RNA, 23 nt, synthetic construct
  modified_base 22..23: mod_base = OTHER; note = thymine
  misc_feature 1..23: note = Description of Artificial Sequence: Synthetic oligonucleotide
  source 1..23: mol_type = other RNA
tttcaaagttggtagtttgtttt

SEQ ID NO: 487 - RNA, 23 nt, synthetic construct
  modified_base 22..23: mod_base = OTHER; note = thymine
  misc_feature 1..23: note = Description of Artificial Sequence: Synthetic oligonucleotide
  source 1..23: mol_type = other RNA
attggattttcaaagttggtatt

SEQ ID NO: 488 - RNA, 23 nt, synthetic construct
  modified_base 22..23: mod_base = OTHER; note = thymine
  misc_feature 1..23: note = Description of Artificial Sequence: Synthetic oligonucleotide
  source 1..23: mol_type = other RNA
atagattggattttcaaagtttt

SEQ ID NO: 489 - RNA, 23 nt, synthetic construct
  modified_base 22..23: mod_base = OTHER; note = thymine
  misc_feature 1..23: note = Description of Artificial Sequence: Synthetic oligonucleotide
  source 1..23: mol_type = other RNA
ttaaaagtgtcttctgttgcatt

SEQ ID NO: 490 - RNA, 23 nt, synthetic construct
  modified_base 22..23: mod_base = OTHER; note = thymine
  misc_feature 1..23: note = Description of Artificial Sequence: Synthetic oligonucleotide
  source 1..23: mol_type = other RNA
tctttaacaagatttgcggtgtt

SEQ ID NO: 491 - RNA, 23 nt, synthetic construct
  modified_base 22..23: mod_base = OTHER; note = thymine
  misc_feature 1..23: note = Description of Artificial Sequence: Synthetic oligonucleotide
  source 1..23: mol_type = other RNA
tcttctttaacaagatttgcgtt

SEQ ID NO: 492 - RNA, 23 nt, synthetic construct
  modified_base 22..23: mod_base = OTHER; note = thymine
  misc_feature 1..23: note = Description of Artificial Sequence: Synthetic oligonucleotide
  source 1..23: mol_type = other RNA
tggtatagctatacttcagagtt

SEQ ID NO: 493 - RNA, 23 nt, synthetic construct
  modified_base 22..23: mod_base = OTHER; note = thymine
  misc_feature 1..23: note = Description of Artificial Sequence: Synthetic oligonucleotide
  source 1..23: mol_type = other RNA
attattccctaaatagctggttt

SEQ ID NO: 494 - RNA, 23 nt, synthetic construct
  modified_base 22..23: mod_base = OTHER; note = thymine
  misc_feature 1..23: note = Description of Artificial Sequence: Synthetic oligonucleotide
  source 1..23: mol_type = other RNA
taattattccctaaatagctgtt

SEQ ID NO: 495 - RNA, 23 nt, synthetic construct
  modified_base 22..23: mod_base = OTHER; note = thymine
  misc_feature 1..23: note = Description of Artificial Sequence: Synthetic oligonucleotide
  source 1..23: mol_type = other RNA
atatatgtgcaaaagtgtgtttt

SEQ ID NO: 496 - RNA, 23 nt, synthetic construct
  modified_base 22..23: mod_base = OTHER; note = thymine
  misc_feature 1..23: note = Description of Artificial Sequence: Synthetic oligonucleotide
  source 1..23: mol_type = other RNA
aaatatatgtgcaaaagtgtgtt

SEQ ID NO: 497 - RNA, 23 nt, synthetic construct
  modified_base 22..23: mod_base = OTHER; note = thymine
  misc_feature 1..23: note = Description of Artificial Sequence: Synthetic oligonucleotide
  source 1..23: mol_type = other RNA
aacttttttcatctgtttgtatt

SEQ ID NO: 498 - RNA, 23 nt, synthetic construct
  modified_base 22..23: mod_base = OTHER; note = thymine
  misc_feature 1..23: note = Description of Artificial Sequence: Synthetic oligonucleotide
  source 1..23: mol_type = other RNA
taaagtactgaatgttaactttt

SEQ ID NO: 499 - RNA, 23 nt, synthetic construct
  modified_base 22..23: mod_base = OTHER; note = thymine
  misc_feature 1..23: note = Description of Artificial Sequence: Synthetic oligonucleotide
  source 1..23: mol_type = other RNA
tttttttcataaagtactgaatt

SEQ ID NO: 500 - RNA, 23 nt, synthetic construct
  modified_base 22..23: mod_base = OTHER; note = thymine
  misc_feature 1..23: note = Description of Artificial Sequence: Synthetic oligonucleotide
  source 1..23: mol_type = other RNA
tatttttttcataaagtactgtt

SEQ ID NO: 501 - RNA, 23 nt, synthetic construct
  modified_base 22..23: mod_base = OTHER; note = thymine
  misc_feature 1..23: note = Description of Artificial Sequence: Synthetic oligonucleotide
  source 1..23: mol_type = other RNA
atttgtaaaaatatgagacggtt

SEQ ID NO: 502 - RNA, 23 nt, synthetic construct
  modified_base 22..23: mod_base = OTHER; note = thymine
  misc_feature 1..23: note = Description of Artificial Sequence: Synthetic oligonucleotide
  source 1..23: mol_type = other RNA
acattgtgataattatttgtatt

SEQ ID NO: 503 - RNA, 23 nt, synthetic construct
  modified_base 22..23: mod_base = OTHER; note = thymine
  misc_feature 1..23: note = Description of Artificial Sequence: Synthetic oligonucleotide
  source 1..23: mol_type = other RNA
atacatatagtacattgtgattt

SEQ ID NO: 504 - RNA, 23 nt, synthetic construct
  modified_base 22..23: mod_base = OTHER; note = thymine
  misc_feature 1..23: note = Description of Artificial Sequence: Synthetic oligonucleotide
  source 1..23: mol_type = other RNA
atatacatatagtacattgtgtt

SEQ ID NO: 505 - RNA, 23 nt, synthetic construct
  modified_base 22..23: mod_base = OTHER; note = thymine
  misc_feature 1..23: note = Description of Artificial Sequence: Synthetic oligonucleotide
  source 1..23: mol_type = other RNA
aaagatatacatatagtacattt

SEQ ID NO: 506 - RNA, 23 nt, synthetic construct
  modified_base 22..23: mod_base = OTHER; note = thymine
  misc_feature 1..23: note = Description of Artificial Sequence: Synthetic oligonucleotide
  source 1..23: mol_type = other RNA
attaccttcagacaacttcagtt

SEQ ID NO: 507 - RNA, 23 nt, synthetic construct
  modified_base 22..23: mod_base = OTHER; note = thymine
  misc_feature 1..23: note = Description of Artificial Sequence: Synthetic oligonucleotide
  source 1..23: mol_type = other RNA
tatttatagtattaccttcagtt

SEQ ID NO: 508 - RNA, 23 nt, synthetic construct
  modified_base 22..23: mod_base = OTHER; note = thymine
  misc_feature 1..23: note = Description of Artificial Sequence: Synthetic oligonucleotide
  source 1..23: mol_type = other RNA
taatctttccaaaatttacaatt

SEQ ID NO: 509 - RNA, 23 nt, synthetic construct
  modified_base 22..23: mod_base = OTHER; note = thymine
  misc_feature 1..23: note = Description of Artificial Sequence: Synthetic oligonucleotide
  source 1..23: mol_type = other RNA
agtaacaggataatctttccatt

SEQ ID NO: 510 - RNA, 23 nt, synthetic construct
  modified_base 22..23: mod_base = OTHER; note = thymine
  misc_feature 1..23: note = Description of Artificial Sequence: Synthetic oligonucleotide
  source 1..23: mol_type = other RNA
attcagtaacaggataatctttt

SEQ ID NO: 511 - RNA, 23 nt, synthetic construct
  modified_base 22..23: mod_base = OTHER; note = thymine
  misc_feature 1..23: note = Description of Artificial Sequence: Synthetic oligonucleotide
  source 1..23: mol_type = other RNA
tagcaaattcagtaacaggattt

SEQ ID NO: 512 - RNA, 23 nt, synthetic construct
  modified_base 22..23: mod_base = OTHER; note = thymine
  misc_feature 1..23: note = Description of Artificial Sequence: Synthetic oligonucleotide
  source 1..23: mol_type = other RNA
ttagcaaattcagtaacaggatt

SEQ ID NO: 513 - RNA, 23 nt, synthetic construct
  modified_base 22..23: mod_base = OTHER; note = thymine
  misc_feature 1..23: note = Description of Artificial Sequence: Synthetic oligonucleotide
  source 1..23: mol_type = other RNA
tctttattagcaaattcagtatt

SEQ ID NO: 514 - RNA, 23 nt, synthetic construct
  modified_base 22..23: mod_base = OTHER; note = thymine
  misc_feature 1..23: note = Description of Artificial Sequence: Synthetic oligonucleotide
  source 1..23: mol_type = other RNA
atcatttactataatgatcactt

SEQ ID NO: 515 - RNA, 23 nt, synthetic construct
  modified_base 22..23: mod_base = OTHER; note = thymine
  misc_feature 1..23: note = Description of Artificial Sequence: Synthetic oligonucleotide
  source 1..23: mol_type = other RNA
ttcttgttggatcatttactatt

SEQ ID NO: 516 - RNA, 23 nt, synthetic construct
  modified_base 22..23: mod_base = OTHER; note = thymine
  misc_feature 1..23: note = Description of Artificial Sequence: Synthetic oligonucleotide
  source 1..23: mol_type = other RNA
tcaattccttttcttgttggatt

SEQ ID NO: 517 - RNA, 23 nt, synthetic construct
  modified_base 22..23: mod_base = OTHER; note = thymine
  misc_feature 1..23: note = Description of Artificial Sequence: Synthetic oligonucleotide
  source 1..23: mol_type = other RNA
attttataggaaatatgagtgtt

SEQ ID NO: 518 - RNA, 23 nt, synthetic construct
  modified_base 22..23: mod_base = OTHER; note = thymine
  misc_feature 1..23: note = Description of Artificial Sequence: Synthetic oligonucleotide
  source 1..23: mol_type = other RNA
taattttataggaaatatgagtt

SEQ ID NO: 519 - RNA, 23 nt, synthetic construct
  modified_base 22..23: mod_base = OTHER; note = thymine
  misc_feature 1..23: note = Description of Artificial Sequence: Synthetic oligonucleotide
  source 1..23: mol_type = other RNA
tgctaatgtgtaaaaatggactt

SEQ ID NO: 520 - RNA, 23 nt, synthetic construct
  modified_base 22..23: mod_base = OTHER; note = thymine
  misc_feature 1..23: note = Description of Artificial Sequence: Synthetic oligonucleotide
  source 1..23: mol_type = other RNA
ttgaacattaattaagtgctatt

SEQ ID NO: 521 - RNA, 23 nt, synthetic construct
  modified_base 22..23: mod_base = OTHER; note = thymine
  misc_feature 1..23: note = Description of Artificial Sequence: Synthetic oligonucleotide
  source 1..23: mol_type = other RNA
attgaacattaattaagtgcttt

SEQ ID NO: 522 - RNA, 23 nt, synthetic construct
  modified_base 22..23: mod_base = OTHER; note = thymine
  misc_feature 1..23: note = Description of Artificial Sequence: Synthetic oligonucleotide
  source 1..23: mol_type = other RNA
atattgaacattaattaagtgtt

SEQ ID NO: 523 - RNA, 23 nt, synthetic construct
  modified_base 22..23: mod_base = OTHER; note = thymine
  misc_feature 1..23: note = Description of Artificial Sequence: Synthetic oligonucleotide
  source 1..23: mol_type = other RNA
aaattgacatgtaatattgaatt

SEQ ID NO: 524 - RNA, 23 nt, synthetic construct
  modified_base 22..23: mod_base = OTHER; note = thymine
  misc_feature 1..23: note = Description of Artificial Sequence: Synthetic oligonucleotide
  source 1..23: mol_type = other RNA
atcaacatagccattaatcaatt

SEQ ID NO: 525 - RNA, 23 nt, synthetic construct
  modified_base 22..23: mod_base = OTHER; note = thymine
  misc_feature 1..23: note = Description of Artificial Sequence: Synthetic oligonucleotide
  source 1..23: mol_type = other RNA
tctatacaacacatagtggcctt

SEQ ID NO: 526 - RNA, 23 nt, synthetic construct
  modified_base 22..23: mod_base = OTHER; note = thymine
  misc_feature 1..23: note = Description of Artificial Sequence: Synthetic oligonucleotide
  source 1..23: mol_type = other RNA
atgtctatacaacacatagtgtt

SEQ ID NO: 527 - RNA, 23 nt, synthetic construct
  modified_base 22..23: mod_base = OTHER; note = thymine
  misc_feature 1..23: note = Description of Artificial Sequence: Synthetic oligonucleotide
  source 1..23: mol_type = other RNA
actgaattgcttttcctaccttt

SEQ ID NO: 528 - RNA, 23 nt, synthetic construct
  modified_base 22..23: mod_base = OTHER; note = thymine
  misc_feature 1..23: note = Description of Artificial Sequence: Synthetic oligonucleotide
  source 1..23: mol_type = other RNA
aaataaaaatgttgtcttggctt

SEQ ID NO: 529 - RNA, 23 nt, synthetic construct
  modified_base 22..23: mod_base = OTHER; note = thymine
  misc_feature 1..23: note = Description of Artificial Sequence: Synthetic oligonucleotide
  source 1..23: mol_type = other RNA
atcacaaataaaaatgttgtctt

SEQ ID NO: 530 - RNA, 23 nt, synthetic construct
  modified_base 22..23: mod_base = OTHER; note = thymine
  misc_feature 1..23: note = Description of Artificial Sequence: Synthetic oligonucleotide
  source 1..23: mol_type = other RNA
aatgatatgggatttcctcattt

SEQ ID NO: 531 - RNA, 23 nt, synthetic construct
  modified_base 22..23: mod_base = OTHER; note = thymine
  misc_feature 1..23: note = Description of Artificial Sequence: Synthetic oligonucleotide
  source 1..23: mol_type = other RNA
attaaccacaaactcaatgcatt

SEQ ID NO: 532 - RNA, 23 nt, synthetic construct
  modified_base 22..23: mod_base = OTHER; note = thymine
  misc_feature 1..23: note = Description of Artificial Sequence: Synthetic oligonucleotide
  source 1..23: mol_type = other RNA
tttaattaaccacaaactcaatt

SEQ ID NO: 533 - RNA, 23 nt, synthetic construct
  modified_base 22..23: mod_base = OTHER; note = thymine
  misc_feature 1..23: note = Description of Artificial Sequence: Synthetic oligonucleotide
  source 1..23: mol_type = other RNA
tttggtttcagaaattcagcttt

SEQ ID NO: 534 - RNA, 23 nt, synthetic construct
  modified_base 22..23: mod_base = OTHER; note = thymine
  misc_feature 1..23: note = Description of Artificial Sequence: Synthetic oligonucleotide
  source 1..23: mol_type = other RNA
ttatgaagacacagatttggttt

SEQ ID NO: 535 - RNA, 23 nt, synthetic construct
  modified_base 22..23: mod_base = OTHER; note = thymine
  misc_feature 1..23: note = Description of Artificial Sequence: Synthetic oligonucleotide
  source 1..23: mol_type = other RNA
tttcatagaaacaaaaacccatt

SEQ ID NO: 536 - RNA, 23 nt, synthetic construct
  modified_base 22..23: mod_base = OTHER; note = thymine
  misc_feature 1..23: note = Description of Artificial Sequence: Synthetic oligonucleotide
  source 1..23: mol_type = other RNA
atgatattttcatagaaacaatt

SEQ ID NO: 537 - RNA, 23 nt, synthetic construct
  modified_base 22..23: mod_base = OTHER; note = thymine
  misc_feature 1..23: note = Description of Artificial Sequence: Synthetic oligonucleotide
  source 1..23: mol_type = other RNA
tataatgatattttcatagaatt

SEQ ID NO: 538 - RNA, 23 nt, synthetic construct
  modified_base 22..23: mod_base = OTHER; note = thymine
  misc_feature 1..23: note = Description of Artificial Sequence: Synthetic oligonucleotide
  source 1..23: mol_type = other RNA
tgattataatgatattttcattt

SEQ ID NO: 539 - RNA, 23 nt, synthetic construct
  modified_base 22..23: mod_base = OTHER; note = thymine
  misc_feature 1..23: note = Description of Artificial Sequence: Synthetic oligonucleotide
  source 1..23: mol_type = other RNA
ataaatagtgattataatgattt

SEQ ID NO: 540 - RNA, 23 nt, synthetic construct
  modified_base 22..23: mod_base = OTHER; note = thymine
  misc_feature 1..23: note = Description of Artificial Sequence: Synthetic oligonucleotide
  source 1..23: mol_type = other RNA
aaaagcttaataagaatggtttt

SEQ ID NO: 541 - RNA, 23 nt, synthetic construct
  modified_base 22..23: mod_base = OTHER; note = thymine
  misc_feature 1..23: note = Description of Artificial Sequence: Synthetic oligonucleotide
  source 1..23: mol_type = other RNA
aaaaagcttaataagaatggttt

SEQ ID NO: 542 - RNA, 23 nt, synthetic construct
  modified_base 22..23: mod_base = OTHER; note = thymine
  misc_feature 1..23: note = Description of Artificial Sequence: Synthetic oligonucleotide
  source 1..23: mol_type = other RNA
taaatgtacacatttagccactt

SEQ ID NO: 543 - RNA, 23 nt, synthetic construct
  modified_base 22..23: mod_base = OTHER; note = thymine
  misc_feature 1..23: note = Description of Artificial Sequence: Synthetic oligonucleotide
  source 1..23: mol_type = other RNA
ataaatgtacacatttagccatt

SEQ ID NO: 544 - RNA, 23 nt, synthetic construct
  modified_base 22..23: mod_base = OTHER; note = thymine
  misc_feature 1..23: note = Description of Artificial Sequence: Synthetic oligonucleotide
  source 1..23: mol_type = other RNA
tataaatgtacacatttagcctt

SEQ ID NO: 545 - RNA, 23 nt, synthetic construct
  modified_base 22..23: mod_base = OTHER; note = thymine
  misc_feature 1..23: note = Description of Artificial Sequence: Synthetic oligonucleotide
  source 1..23: mol_type = other RNA
ttctaatataaatgtacacattt

SEQ ID NO: 546 - RNA, 23 nt, synthetic construct
  modified_base 22..23: mod_base = OTHER; note = thymine
  misc_feature 1..23: note = Description of Artificial Sequence: Synthetic oligonucleotide
  source 1..23: mol_type = other RNA
aagaattaaagaaaagatctgtt

SEQ ID NO: 547 - RNA, 23 nt, synthetic construct
  modified_base 22..23: mod_base = OTHER; note = thymine
  misc_feature 1..23: note = Description of Artificial Sequence: Synthetic oligonucleotide
  source 1..23: mol_type = other RNA
aataagaattaaagaaaagattt

SEQ ID NO: 548 - RNA, 23 nt, synthetic construct
  modified_base 22..23: mod_base = OTHER; note = thymine
  misc_feature 1..23: note = Description of Artificial Sequence: Synthetic oligonucleotide
  source 1..23: mol_type = other RNA
aaaccaataagaattaaagaatt

SEQ ID NO: 549 - RNA, 23 nt, synthetic construct
  modified_base 22..23: mod_base = OTHER; note = thymine
  misc_feature 1..23: note = Description of Artificial Sequence: Synthetic oligonucleotide
  source 1..23: mol_type = other RNA
actatacccactatttaagagtt

SEQ ID NO: 550 - RNA, 23 nt, synthetic construct
  modified_base 22..23: mod_base = OTHER; note = thymine
  misc_feature 1..23: note = Description of Artificial Sequence: Synthetic oligonucleotide
  source 1..23: mol_type = other RNA
acaaatgtgcaatattagcactt

SEQ ID NO: 551 - RNA, 23 nt, synthetic construct
  modified_base 22..23: mod_base = OTHER; note = thymine
  misc_feature 1..23: note = Description of Artificial Sequence: Synthetic oligonucleotide
  source 1..23: mol_type = other RNA
aacaaatgtgcaatattagcatt

SEQ ID NO: 552 - RNA, 23 nt, synthetic construct
  modified_base 22..23: mod_base = OTHER; note = thymine
  misc_feature 1..23: note = Description of Artificial Sequence: Synthetic oligonucleotide
  source 1..23: mol_type = other RNA
atgtttcattcattcatccattt

SEQ ID NO: 553 - RNA, 23 nt, synthetic construct
  modified_base 22..23: mod_base = OTHER; note = thymine
  misc_feature 1..23: note = Description of Artificial Sequence: Synthetic oligonucleotide
  source 1..23: mol_type = other RNA
agtagtatatgtttcattcattt

SEQ ID NO: 554 - RNA, 23 nt, synthetic construct
  modified_base 22..23: mod_base = OTHER; note = thymine
  misc_feature 1..23: note = Description of Artificial Sequence: Synthetic oligonucleotide
  source 1..23: mol_type = other RNA
aatcagtagtatatgtttcattt

SEQ ID NO: 555 - RNA, 23 nt, synthetic construct
  modified_base 22..23: mod_base = OTHER; note = thymine
  misc_feature 1..23: note = Description of Artificial Sequence: Synthetic oligonucleotide
  source 1..23: mol_type = other RNA
aaataatcagtagtatatgtttt

SEQ ID NO: 556 - RNA, 23 nt, synthetic construct
  modified_base 22..23: mod_base = OTHER; note = thymine
  misc_feature 1..23: note = Description of Artificial Sequence: Synthetic oligonucleotide
  source 1..23: mol_type = other RNA
aatcaaagtaattacagtcagtt

SEQ ID NO: 557 - RNA, 23 nt, synthetic construct
  modified_base 22..23: mod_base = OTHER; note = thymine
  misc_feature 1..23: note = Description of Artificial Sequence: Synthetic oligonucleotide
  source 1..23: mol_type = other RNA
atctaatcaaagtaattacagtt

SEQ ID NO: 558 - RNA, 23 nt, synthetic construct
  modified_base 22..23: mod_base = OTHER; note = thymine
  misc_feature 1..23: note = Description of Artificial Sequence: Synthetic oligonucleotide
  source 1..23: mol_type = other RNA
ttatttccagttgtttatctatt

SEQ ID NO: 559 - RNA, 23 nt, synthetic construct
  modified_base 22..23: mod_base = OTHER; note = thymine
  misc_feature 1..23: note = Description of Artificial Sequence: Synthetic oligonucleotide
  source 1..23: mol_type = other RNA
ttattagaactttttcagcagtt

SEQ ID NO: 560 - RNA, 23 nt, synthetic construct
  modified_base 22..23: mod_base = OTHER; note = thymine
  misc_feature 1..23: note = Description of Artificial Sequence: Synthetic oligonucleotide
  source 1..23: mol_type = other RNA
tttattagaactttttcagcatt

SEQ ID NO: 561 - RNA, 23 nt, synthetic construct
  modified_base 22..23: mod_base = OTHER; note = thymine
  misc_feature 1..23: note = Description of Artificial Sequence: Synthetic oligonucleotide
  source 1..23: mol_type = other RNA
gtcaagattgctcacaaagtatt

SEQ ID NO: 562 - RNA, 23 nt, synthetic construct
  modified_base 22..23: mod_base = OTHER; note = thymine
  misc_feature 1..23: note = Description of Artificial Sequence: Synthetic oligonucleotide
  source 1..23: mol_type = other RNA
gtcagtgtatcccaagtgaattt

SEQ ID NO: 563 - RNA, 23 nt, synthetic construct
  modified_base 22..23: mod_base = OTHER; note = thymine
  misc_feature 1..23: note = Description of Artificial Sequence: Synthetic oligonucleotide
  source 1..23: mol_type = other RNA
ttgcacaatgagttttcatgttt

SEQ ID NO: 564 - RNA, 25 nt, synthetic construct
  modified_base 24..25: mod_base = OTHER; note = thymine
  misc_feature 1..25: note = Description of Artificial Sequence: Synthetic oligonucleotide
  source 1..25: mol_type = other RNA
tggagaagatgactgtaaagatatt

SEQ ID NO: 565 - RNA, 23 nt, synthetic construct
  modified_base 22..23: mod_base = OTHER; note = thymine
  misc_feature 1..23: note = Description of Artificial Sequence: Synthetic oligonucleotide
  source 1..23: mol_type = other RNA
gagaagatgactgtaaagatatt

SEQ ID NO: 566 - RNA, 23 nt, synthetic construct
  modified_base 22..23: mod_base = OTHER; note = thymine
  misc_feature 1..23: note = Description of Artificial Sequence: Synthetic oligonucleotide
  source 1..23: mol_type = other RNA
ctcatgatgttcataaatgtttt

SEQ ID NO: 567 - RNA, 23 nt, synthetic construct
  modified_base 22..23: mod_base = OTHER; note = thymine
  misc_feature 1..23: note = Description of Artificial Sequence: Synthetic oligonucleotide
  source 1..23: mol_type = other RNA
ctccatttataaagtttgtgatt

SEQ ID NO: 568 - RNA, 23 nt, synthetic construct
  modified_base 22..23: mod_base = OTHER; note = thymine
  misc_feature 1..23: note = Description of Artificial Sequence: Synthetic oligonucleotide
  source 1..23: mol_type = other RNA
tccatttataaagtttgtgattt

SEQ ID NO: 569 - RNA, 23 nt, synthetic construct
  modified_base 22..23: mod_base = OTHER; note = thymine
  misc_feature 1..23: note = Description of Artificial Sequence: Synthetic oligonucleotide
  source 1..23: mol_type = other RNA
taccggaaaatactgtagtattt

SEQ ID NO: 570 - RNA, 23 nt, synthetic construct
  modified_base 22..23: mod_base = OTHER; note = thymine
  misc_feature 1..23: note = Description of Artificial Sequence: Synthetic oligonucleotide
  source 1..23: mol_type = other RNA
ccggaaaatactgtagtatgatt

SEQ ID NO: 571 - RNA, 23 nt, synthetic construct
  modified_base 22..23: mod_base = OTHER; note = thymine
  misc_feature 1..23: note = Description of Artificial Sequence: Synthetic oligonucleotide
  source 1..23: mol_type = other RNA
tgccagatatggggaatttgttt

SEQ ID NO: 572 - RNA, 23 nt, synthetic construct
  modified_base 22..23: mod_base = OTHER; note = thymine
  misc_feature 1..23: note = Description of Artificial Sequence: Synthetic oligonucleotide
  source 1..23: mol_type = other RNA
ctgtgaagaagggtatatctttt

SEQ ID NO: 573 - RNA, 23 nt, synthetic construct
  modified_base 22..23: mod_base = OTHER; note = thymine
  misc_feature 1..23: note = Description of Artificial Sequence: Synthetic oligonucleotide
  source 1..23: mol_type = other RNA
tggacagtattgcaaagctaatt

SEQ ID NO: 574 - RNA, 23 nt, synthetic construct
  modified_base 22..23: mod_base = OTHER; note = thymine
  misc_feature 1..23: note = Description of Artificial Sequence: Synthetic oligonucleotide
  source 1..23: mol_type = other RNA
cagtattgcaaagctaatgattt

SEQ ID NO: 575 - RNA, 23 nt, synthetic construct
  modified_base 22..23: mod_base = OTHER; note = thymine
  misc_feature 1..23: note = Description of Artificial Sequence: Synthetic oligonucleotide
  source 1..23: mol_type = other RNA
tgcaaagctaatgattccttttt

SEQ ID NO: 576 - RNA, 23 nt, synthetic construct
  modified_base 22..23: mod_base = OTHER; note = thymine
  misc_feature 1..23: note = Description of Artificial Sequence: Synthetic oligonucleotide
  source 1..23: mol_type = other RNA
ttgttaattggtgatattcattt

SEQ ID NO: 577 - RNA, 23 nt, synthetic construct
  modified_base 22..23: mod_base = OTHER; note = thymine
  misc_feature 1..23: note = Description of Artificial Sequence: Synthetic oligonucleotide
  source 1..23: mol_type = other RNA
ccgtgcaaaataaggtttttttt

SEQ ID NO: 578 - RNA, 23 nt, synthetic construct
  modified_base 22..23: mod_base = OTHER; note = thymine
  misc_feature 1..23: note = Description of Artificial Sequence: Synthetic oligonucleotide
  source 1..23: mol_type = other RNA
gtgcaaaataaggttttttcatt

SEQ ID NO: 579 - RNA, 23 nt, synthetic construct
  modified_base 22..23: mod_base = OTHER; note = thymine
  misc_feature 1..23: note = Description of Artificial Sequence: Synthetic oligonucleotide
  source 1..23: mol_type = other RNA
aaggttttttcagttgacatttt

SEQ ID NO: 580 - RNA, 23 nt, synthetic construct
  modified_base 22..23: mod_base = OTHER; note = thymine
  misc_feature 1..23: note = Description of Artificial Sequence: Synthetic oligonucleotide
  source 1..23: mol_type = other RNA
aggttttttcagttgacattatt

SEQ ID NO: 581 - RNA, 23 nt, synthetic construct
  modified_base 22..23: mod_base = OTHER; note = thymine
  misc_feature 1..23: note = Description of Artificial Sequence: Synthetic oligonucleotide
  source 1..23: mol_type = other RNA
cagttgacattaatggtttaatt

SEQ ID NO: 582 - RNA, 23 nt, synthetic construct
  modified_base 22..23: mod_base = OTHER; note = thymine
  misc_feature 1..23: note = Description of Artificial Sequence: Synthetic oligonucleotide
  source 1..23: mol_type = other RNA
ttgacattaatggtttaaatatt

SEQ ID NO: 583 - RNA, 23 nt, synthetic construct
  modified_base 22..23: mod_base = OTHER; note = thymine
  misc_feature 1..23: note = Description of Artificial Sequence: Synthetic oligonucleotide
  source 1..23: mol_type = other RNA
ctgggttaataataaaatctatt

SEQ ID NO: 584 - RNA, 23 nt, synthetic construct
  modified_base 22..23: mod_base = OTHER; note = thymine
  misc_feature 1..23: note = Description of Artificial Sequence: Synthetic oligonucleotide
  source 1..23: mol_type = other RNA
tgggttaataataaaatctattt

SEQ ID NO: 585 - RNA, 23 nt, synthetic construct
  modified_base 22..23: mod_base = OTHER; note = thymine
  misc_feature 1..23: note = Description of Artificial Sequence: Synthetic oligonucleotide
  source 1..23: mol_type = other RNA
ccgcatagatatggtaaattttt

SEQ ID NO: 586 - RNA, 23 nt, synthetic construct
  modified_base 22..23: mod_base = OTHER; note = thymine
  misc_feature 1..23: note = Description of Artificial Sequence: Synthetic oligonucleotide
  source 1..23: mol_type = other RNA
tacccttataactgaaaactttt

SEQ ID NO: 587 - RNA, 23 nt, synthetic construct
  modified_base 22..23: mod_base = OTHER; note = thymine
  misc_feature 1..23: note = Description of Artificial Sequence: Synthetic oligonucleotide
  source 1..23: mol_type = other RNA
cccaactgttggttatttatttt

SEQ ID NO: 588 - RNA, 23 nt, synthetic construct
  modified_base 22..23: mod_base = OTHER; note = thymine
  misc_feature 1..23: note = Description of Artificial Sequence: Synthetic oligonucleotide
  source 1..23: mol_type = other RNA
ctgttggttatttatttttcttt

SEQ ID NO: 589 - RNA, 23 nt, synthetic construct
  modified_base 22..23: mod_base = OTHER; note = thymine
  misc_feature 1..23: note = Description of Artificial Sequence: Synthetic oligonucleotide
  source 1..23: mol_type = other RNA
gggtaactctggatatgatattt

SEQ ID NO: 590 - RNA, 23 nt, synthetic construct
  modified_base 22..23: mod_base = OTHER; note = thymine
  misc_feature 1..23: note = Description of Artificial Sequence: Synthetic oligonucleotide
  source 1..23: mol_type = other RNA
cggtttgattacattgaaacttt

SEQ ID NO: 591 - RNA, 23 nt, synthetic construct
  modified_base 22..23: mod_base = OTHER; note = thymine
  misc_feature 1..23: note = Description of Artificial Sequence: Synthetic oligonucleotide
  source 1..23: mol_type = other RNA
ttgattacattgaaactgtaatt

SEQ ID NO: 592 - RNA, 23 nt, synthetic construct
  modified_base 22..23: mod_base = OTHER; note = thymine
  misc_feature 1..23: note = Description of Artificial Sequence: Synthetic oligonucleotide
  source 1..23: mol_type = other RNA
tacattgaaactgtaacttattt

SEQ ID NO: 593 - RNA, 23 nt, synthetic construct
  modified_base 22..23: mod_base = OTHER; note = thymine
  misc_feature 1..23: note = Description of Artificial Sequence: Synthetic oligonucleotide
  source 1..23: mol_type = other RNA
tgctaccaatccgtgtaaagatt

SEQ ID NO: 594 - RNA, 23 nt, synthetic construct
  modified_base 22..23: mod_base = OTHER; note = thymine
  misc_feature 1..23: note = Description of Artificial Sequence: Synthetic oligonucleotide
  source 1..23: mol_type = other RNA
ttctttgtcgggattgatttttt

SEQ ID NO: 595 - RNA, 23 nt, synthetic construct
  modified_base 22..23: mod_base = OTHER; note = thymine
  misc_feature 1..23: note = Description of Artificial Sequence: Synthetic oligonucleotide
  source 1..23: mol_type = other RNA
cagcactatctttttttcagatt

SEQ ID NO: 596 - RNA, 23 nt, synthetic construct
  modified_base 22..23: mod_base = OTHER; note = thymine
  misc_feature 1..23: note = Description of Artificial Sequence: Synthetic oligonucleotide
  source 1..23: mol_type = other RNA
agcactatctttttttcagattt

SEQ ID NO: 597 - RNA, 23 nt, synthetic construct
  modified_base 22..23: mod_base = OTHER; note = thymine
  misc_feature 1..23: note = Description of Artificial Sequence: Synthetic oligonucleotide
  source 1..23: mol_type = other RNA
atgtcaaaacacatgattttttt

SEQ ID NO: 598 - RNA, 23 nt, synthetic construct
  modified_base 22..23: mod_base = OTHER; note = thymine
  misc_feature 1..23: note = Description of Artificial Sequence: Synthetic oligonucleotide
  source 1..23: mol_type = other RNA
aacacatgatttttaagcaaatt

SEQ ID NO: 599 - RNA, 23 nt, synthetic construct
  modified_base 22..23: mod_base = OTHER; note = thymine
  misc_feature 1..23: note = Description of Artificial Sequence: Synthetic oligonucleotide
  source 1..23: mol_type = other RNA
gggtggaaaatgttgaaagtttt

SEQ ID NO: 600 - RNA, 23 nt, synthetic construct
  modified_base 22..23: mod_base = OTHER; note = thymine
  misc_feature 1..23: note = Description of Artificial Sequence: Synthetic oligonucleotide
  source 1..23: mol_type = other RNA
tggcttttgattggatttcaatt

SEQ ID NO: 601 - RNA, 23 nt, synthetic construct
  modified_base 22..23: mod_base = OTHER; note = thymine
  misc_feature 1..23: note = Description of Artificial Sequence: Synthetic oligonucleotide
  source 1..23: mol_type = other RNA
ggcttttgattggatttcaaatt

SEQ ID NO: 602 - RNA, 23 nt, synthetic construct
  modified_base 22..23: mod_base = OTHER; note = thymine
  misc_feature 1..23: note = Description of Artificial Sequence: Synthetic oligonucleotide
  source 1..23: mol_type = other RNA
ttggatttcaaagaatctctatt

SEQ ID NO: 603 - RNA, 23 nt, synthetic construct
  modified_base 22..23: mod_base = OTHER; note = thymine
  misc_feature 1..23: note = Description of Artificial Sequence: Synthetic oligonucleotide
  source 1..23: mol_type = other RNA
tggatttcaaagaatctctattt

SEQ ID NO: 604 - RNA, 23 nt, synthetic construct
  modified_base 22..23: mod_base = OTHER; note = thymine
  misc_feature 1..23: note = Description of Artificial Sequence: Synthetic oligonucleotide
  source 1..23: mol_type = other RNA
cacagtagttcagtatttaaatt

SEQ ID NO: 605 - RNA, 23 nt, synthetic construct
  modified_base 22..23: mod_base = OTHER; note = thymine
  misc_feature 1..23: note = Description of Artificial Sequence: Synthetic oligonucleotide
  source 1..23: mol_type = other RNA
cagtagttcagtatttaaatatt

SEQ ID NO: 606 - RNA, 23 nt, synthetic construct
  modified_base 22..23: mod_base = OTHER; note = thymine
  misc_feature 1..23: note = Description of Artificial Sequence: Synthetic oligonucleotide
  source 1..23: mol_type = other RNA
atccttttgccgggtatctattt

SEQ ID NO: 607 - RNA, 23 nt, synthetic construct
  modified_base 22..23: mod_base = OTHER; note = thymine
  misc_feature 1..23: note = Description of Artificial Sequence: Synthetic oligonucleotide
  source 1..23: mol_type = other RNA
cccctgtaataaacactactctt

SEQ ID NO: 608 - RNA, 23 nt, synthetic construct
  modified_base 22..23: mod_base = OTHER; note = thymine
  misc_feature 1..23: note = Description of Artificial Sequence: Synthetic oligonucleotide
  source 1..23: mol_type = other RNA
tgggtagatgcctattttgattt

SEQ ID NO: 609 - RNA, 23 nt, synthetic construct
  modified_base 22..23: mod_base = OTHER; note = thymine
  misc_feature 1..23: note = Description of Artificial Sequence: Synthetic oligonucleotide
  source 1..23: mol_type = other RNA
tgcctattttgataaaattgatt

SEQ ID NO: 610 - RNA, 23 nt, synthetic construct
  modified_base 22..23: mod_base = OTHER; note = thymine
  misc_feature 1..23: note = Description of Artificial Sequence: Synthetic oligonucleotide
  source 1..23: mol_type = other RNA
gccatctttggagagcatttatt

SEQ ID NO: 611 - RNA, 23 nt, synthetic construct
  modified_base 22..23: mod_base = OTHER; note = thymine
  misc_feature 1..23: note = Description of Artificial Sequence: Synthetic oligonucleotide
  source 1..23: mol_type = other RNA
ttgcttacatactgcatttgatt

SEQ ID NO: 612 - RNA, 23 nt, synthetic construct
  modified_base 22..23: mod_base = OTHER; note = thymine
  misc_feature 1..23: note = Description of Artificial Sequence: Synthetic oligonucleotide
  source 1..23: mol_type = other RNA
tgcttacatactgcatttgaatt

SEQ ID NO: 613 - RNA, 23 nt, synthetic construct
  modified_base 22..23: mod_base = OTHER; note = thymine
  misc_feature 1..23: note = Description of Artificial Sequence: Synthetic oligonucleotide
  source 1..23: mol_type = other RNA
tggttctaacgcctgtaatcatt

SEQ ID NO: 614 - RNA, 23 nt, synthetic construct
  modified_base 22..23: mod_base = OTHER; note = thymine
  misc_feature 1..23: note = Description of Artificial Sequence: Synthetic oligonucleotide
  source 1..23: mol_type = other RNA
tcgatgattgtcatgataacatt

SEQ ID NO: 615 - RNA, 23 nt, synthetic construct
  modified_base 22..23: mod_base = OTHER; note = thymine
  misc_feature 1..23: note = Description of Artificial Sequence: Synthetic oligonucleotide
  source 1..23: mol_type = other RNA
cacccaatacacctgtgataatt

SEQ ID NO: 616 - RNA, 23 nt, synthetic construct
  modified_base 22..23: mod_base = OTHER; note = thymine
  misc_feature 1..23: note = Description of Artificial Sequence: Synthetic oligonucleotide
  source 1..23: mol_type = other RNA
acccaatacacctgtgataattt

SEQ ID NO: 617 - RNA, 23 nt, synthetic construct
  modified_base 22..23: mod_base = OTHER; note = thymine
  misc_feature 1..23: note = Description of Artificial Sequence: Synthetic oligonucleotide
  source 1..23: mol_type = other RNA
accagtgtatctcaaagaacttt

SEQ ID NO: 618 - RNA, 23 nt, synthetic construct
  modified_base 22..23: mod_base = OTHER; note = thymine
  misc_feature 1..23: note = Description of Artificial Sequence: Synthetic oligonucleotide
  source 1..23: mol_type = other RNA
atgaaaagaactgcaattcgatt

SEQ ID NO: 619 - RNA, 23 nt, synthetic construct
  modified_base 22..23: mod_base = OTHER; note = thymine
  misc_feature 1..23: note = Description of Artificial Sequence: Synthetic oligonucleotide
  source 1..23: mol_type = other RNA
ccccaatcatcgatgtattgatt

SEQ ID NO: 620 - RNA, 23 nt, synthetic construct
  modified_base 22..23: mod_base = OTHER; note = thymine
  misc_feature 1..23: note = Description of Artificial Sequence: Synthetic oligonucleotide
  source 1..23: mol_type = other RNA
tcgatgtattgacctatcgtttt

SEQ ID NO: 621 - RNA, 23 nt, synthetic construct
  modified_base 22..23: mod_base = OTHER; note = thymine
  misc_feature 1..23: note = Description of Artificial Sequence: Synthetic oligonucleotide
  source 1..23: mol_type = other RNA
atgtattgacctatcgtttgttt

SEQ ID NO: 622 - RNA, 23 nt, synthetic construct
  modified_base 22..23: mod_base = OTHER; note = thymine
  misc_feature 1..23: note = Description of Artificial Sequence: Synthetic oligonucleotide
  source 1..23: mol_type = other RNA
tcgttgtgatggtgtttttgatt

SEQ ID NO: 623 - RNA, 23 nt, synthetic construct
  modified_base 22..23: mod_base = OTHER; note = thymine
  misc_feature 1..23: note = Description of Artificial Sequence: Synthetic oligonucleotide
  source 1..23: mol_type = other RNA
cccgaacttctgggaatgtgatt

SEQ ID NO: 624 - RNA, 23 nt, synthetic construct
  modified_base 22..23: mod_base = OTHER; note = thymine
  misc_feature 1..23: note = Description of Artificial Sequence: Synthetic oligonucleotide
  source 1..23: mol_type = other RNA
ccgaacttctgggaatgtgattt

SEQ ID NO: 625 - RNA, 23 nt, synthetic construct
  modified_base 22..23: mod_base = OTHER; note = thymine
  misc_feature 1..23: note = Description of Artificial Sequence: Synthetic oligonucleotide
  source 1..23: mol_type = other RNA
cccaagacttgcccttcatcatt

SEQ ID NO: 626 - RNA, 23 nt, synthetic construct
  modified_base 22..23: mod_base = OTHER; note = thymine
  misc_feature 1..23: note = Description of Artificial Sequence: Synthetic oligonucleotide
  source 1..23: mol_type = other RNA
ttcttacttgccaatgattcttt

SEQ ID NO: 627 - RNA, 23 nt, synthetic construct
  modified_base 22..23: mod_base = OTHER; note = thymine
  misc_feature 1..23: note = Description of Artificial Sequence: Synthetic oligonucleotide
  source 1..23: mol_type = other RNA
aagacatagatgaatgtgatatt

SEQ ID NO: 628 - RNA, 23 nt, synthetic construct
  modified_base 22..23: mod_base = OTHER; note = thymine
  misc_feature 1..23: note = Description of Artificial Sequence: Synthetic oligonucleotide
  source 1..23: mol_type = other RNA
gacatagatgaatgtgatatttt

SEQ ID NO: 629 - RNA, 23 nt, synthetic construct
  modified_base 22..23: mod_base = OTHER; note = thymine
  misc_feature 1..23: note = Description of Artificial Sequence: Synthetic oligonucleotide
  source 1..23: mol_type = other RNA
gtgtgatacaggctacatgtttt

SEQ ID NO: 630 - RNA, 23 nt, synthetic construct
  modified_base 22..23: mod_base = OTHER; note = thymine
  misc_feature 1..23: note = Description of Artificial Sequence: Synthetic oligonucleotide
  source 1..23: mol_type = other RNA
aggctacatgttagaaagtgatt

SEQ ID NO: 631 - RNA, 23 nt, synthetic construct
  modified_base 22..23: mod_base = OTHER; note = thymine
  misc_feature 1..23: note = Description of Artificial Sequence: Synthetic oligonucleotide
  source 1..23: mol_type = other RNA
ggctacatgttagaaagtgattt

SEQ ID NO: 632 - RNA, 23 nt, synthetic construct
  modified_base 22..23: mod_base = OTHER; note = thymine
  misc_feature 1..23: note = Description of Artificial Sequence: Synthetic oligonucleotide
  source 1..23: mol_type = other RNA
gtcgagaatggttcttacatttt

SEQ ID NO: 633 - RNA, 23 nt, synthetic construct
  modified_base 22..23: mod_base = OTHER; note = thymine
  misc_feature 1..23: note = Description of Artificial Sequence: Synthetic oligonucleotide
  source 1..23: mol_type = other RNA
gagaatggttcttacattgtatt

SEQ ID NO: 634 - RNA, 23 nt, synthetic construct
  modified_base 22..23: mod_base = OTHER; note = thymine
  misc_feature 1..23: note = Description of Artificial Sequence: Synthetic oligonucleotide
  source 1..23: mol_type = other RNA
tacattgtagctgttgatttttt

SEQ ID NO: 635 - RNA, 23 nt, synthetic construct
  modified_base 22..23: mod_base = OTHER; note = thymine
  misc_feature 1..23: note = Description of Artificial Sequence: Synthetic oligonucleotide
  source 1..23: mol_type = other RNA
agctgttgattttgattcaattt

SEQ ID NO: 636 - RNA, 23 nt, synthetic construct
  modified_base 22..23: mod_base = OTHER; note = thymine
  misc_feature 1..23: note = Description of Artificial Sequence: Synthetic oligonucleotide
  source 1..23: mol_type = other RNA
ctgttgattttgattcaattatt

SEQ ID NO: 637 - RNA, 23 nt, synthetic construct
  modified_base 22..23: mod_base = OTHER; note = thymine
  misc_feature 1..23: note = Description of Artificial Sequence: Synthetic oligonucleotide
  source 1..23: mol_type = other RNA
ttcaattagtggtcgtatctttt

SEQ ID NO: 638 - RNA, 23 nt, synthetic construct
  modified_base 22..23: mod_base = OTHER; note = thymine
  misc_feature 1..23: note = Description of Artificial Sequence: Synthetic oligonucleotide
  source 1..23: mol_type = other RNA
agcatcatcttgactgaaacttt

SEQ ID NO: 639 - RNA, 23 nt, synthetic construct
  modified_base 22..23: mod_base = OTHER; note = thymine
  misc_feature 1..23: note = Description of Artificial Sequence: Synthetic oligonucleotide
  source 1..23: mol_type = other RNA
atcatcttgactgaaactatttt

SEQ ID NO: 640 - RNA, 23 nt, synthetic construct
  modified_base 22..23: mod_base = OTHER; note = thymine
  misc_feature 1..23: note = Description of Artificial Sequence: Synthetic oligonucleotide
  source 1..23: mol_type = other RNA
ttgactgaaactattgcaatatt

SEQ ID NO: 641 - RNA, 23 nt, synthetic construct
  modified_base 22..23: mod_base = OTHER; note = thymine
  misc_feature 1..23: note = Description of Artificial Sequence: Synthetic oligonucleotide
  source 1..23: mol_type = other RNA
gactgaaactattgcaatagatt

SEQ ID NO: 642 - RNA, 23 nt, synthetic construct
  modified_base 22..23: mod_base = OTHER; note = thymine
  misc_feature 1..23: note = Description of Artificial Sequence: Synthetic oligonucleotide
  source 1..23: mol_type = other RNA
ctgaaactattgcaatagatttt

SEQ ID NO: 643 - RNA, 23 nt, synthetic construct
  modified_base 22..23: mod_base = OTHER; note = thymine
  misc_feature 1..23: note = Description of Artificial Sequence: Synthetic oligonucleotide
  source 1..23: mol_type = other RNA
aacaattgaagtctccaaaattt

SEQ ID NO: 644 - RNA, 23 nt, synthetic construct
  modified_base 22..23: mod_base = OTHER; note = thymine
  misc_feature 1..23: note = Description of Artificial Sequence: Synthetic oligonucleotide
  source 1..23: mol_type = other RNA
tgctgattagtaaaaacctaatt

SEQ ID NO: 645 - RNA, 23 nt, synthetic construct
  modified_base 22..23: mod_base = OTHER; note = thymine
  misc_feature 1..23: note = Description of Artificial Sequence: Synthetic oligonucleotide
  source 1..23: mol_type = other RNA
tagcattagatcccagaatgatt

SEQ ID NO: 646 - RNA, 23 nt, synthetic construct
  modified_base 22..23: mod_base = OTHER; note = thymine
  misc_feature 1..23: note = Description of Artificial Sequence: Synthetic oligonucleotide
  source 1..23: mol_type = other RNA
agcattagatcccagaatgaatt

SEQ ID NO: 647 - RNA, 23 nt, synthetic construct
  modified_base 22..23: mod_base = OTHER; note = thymine
  misc_feature 1..23: note = Description of Artificial Sequence: Synthetic oligonucleotide
  source 1..23: mol_type = other RNA
cagaatgaatgagcatctacttt

SEQ ID NO: 648 - RNA, 23 nt, synthetic construct
  modified_base 22..23: mod_base = OTHER; note = thymine
  misc_feature 1..23: note = Description of Artificial Sequence: Synthetic oligonucleotide
  source 1..23: mol_type = other RNA
atggacttttgtgattataattt

SEQ ID NO: 649 - RNA, 23 nt, synthetic construct
  modified_base 22..23: mod_base = OTHER; note = thymine
  misc_feature 1..23: note = Description of Artificial Sequence: Synthetic oligonucleotide
  source 1..23: mol_type = other RNA
gacttttgtgattataatggatt

SEQ ID NO: 650 - RNA, 23 nt, synthetic construct
  modified_base 22..23: mod_base = OTHER; note = thymine
  misc_feature 1..23: note = Description of Artificial Sequence: Synthetic oligonucleotide
  source 1..23: mol_type = other RNA
gtgtgatttgattatacggcatt

SEQ ID NO: 651 - RNA, 23 nt, synthetic construct
  modified_base 22..23: mod_base = OTHER; note = thymine
  misc_feature 1..23: note = Description of Artificial Sequence: Synthetic oligonucleotide
  source 1..23: mol_type = other RNA
gtcagttgtaatgtataatattt

SEQ ID NO: 652 - RNA, 23 nt, synthetic construct
  modified_base 22..23: mod_base = OTHER; note = thymine
  misc_feature 1..23: note = Description of Artificial Sequence: Synthetic oligonucleotide
  source 1..23: mol_type = other RNA
ttgtaatgtataatattcaattt

SEQ ID NO: 653 - RNA, 23 nt, synthetic construct
  modified_base 22..23: mod_base = OTHER; note = thymine
  misc_feature 1..23: note = Description of Artificial Sequence: Synthetic oligonucleotide
  source 1..23: mol_type = other RNA
atccttcgaaacaaccaaatttt

SEQ ID NO: 654 - RNA, 23 nt, synthetic construct
  modified_base 22..23: mod_base = OTHER; note = thymine
  misc_feature 1..23: note = Description of Artificial Sequence: Synthetic oligonucleotide
  source 1..23: mol_type = other RNA
ttcgaaacaaccaaattccgttt

SEQ ID NO: 655 - RNA, 23 nt, synthetic construct
  modified_base 22..23: mod_base = OTHER; note = thymine
  misc_feature 1..23: note = Description of Artificial Sequence: Synthetic oligonucleotide
  source 1..23: mol_type = other RNA
aacctttcttaataactgtaatt

SEQ ID NO: 656 - RNA, 23 nt, synthetic construct
  modified_base 22..23: mod_base = OTHER; note = thymine
  misc_feature 1..23: note = Description of Artificial Sequence: Synthetic oligonucleotide
  source 1..23: mol_type = other RNA
aggcaacatataatttttggatt

SEQ ID NO: 657 - RNA, 23 nt, synthetic construct
  modified_base 22..23: mod_base = OTHER; note = thymine
  misc_feature 1..23: note = Description of Artificial Sequence: Synthetic oligonucleotide
  source 1..23: mol_type = other RNA
ggcaacatataatttttggaatt

SEQ ID NO: 658 - RNA, 23 nt, synthetic construct
  modified_base 22..23: mod_base = OTHER; note = thymine
  misc_feature 1..23: note = Description of Artificial Sequence: Synthetic oligonucleotide
  source 1..23: mol_type = other RNA
agggatacagaatggtttagatt

SEQ ID NO: 659 - RNA, 23 nt, synthetic construct
  modified_base 22..23: mod_base = OTHER; note = thymine
  misc_feature 1..23: note = Description of Artificial Sequence: Synthetic oligonucleotide
  source 1..23: mol_type = other RNA
gggatacagaatggtttagattt

SEQ ID NO: 660 - RNA, 23 nt, synthetic construct
  modified_base 22..23: mod_base = OTHER; note = thymine
  misc_feature 1..23: note = Description of Artificial Sequence: Synthetic oligonucleotide
  source 1..23: mol_type = other RNA
cagaatggtttagatgttgaatt

SEQ ID NO: 661 - RNA, 23 nt, synthetic construct
  modified_base 22..23: mod_base = OTHER; note = thymine
  misc_feature 1..23: note = Description of Artificial Sequence: Synthetic oligonucleotide
  source 1..23: mol_type = other RNA
tacatctattgggttgaaaattt

SEQ ID NO: 662 - RNA, 23 nt, synthetic construct
  modified_base 22..23: mod_base = OTHER; note = thymine
  misc_feature 1..23: note = Description of Artificial Sequence: Synthetic oligonucleotide
  source 1..23: mol_type = other RNA
aggacagtatttgcttctatatt

SEQ ID NO: 663 - RNA, 23 nt, synthetic construct
  modified_base 22..23: mod_base = OTHER; note = thymine
  misc_feature 1..23: note = Description of Artificial Sequence: Synthetic oligonucleotide
  source 1..23: mol_type = other RNA
cagtatttgcttctatatctatt

SEQ ID NO: 664 - RNA, 21 nt, synthetic construct
  modified_base 20..21: mod_base = OTHER; note = thymine
  misc_feature 1..21: note = Description of Artificial Sequence: Synthetic oligonucleotide
  source 1..21: mol_type = other RNA
ccttctatgaacctggccttt

SEQ ID NO: 665 - RNA, 23 nt, synthetic construct
  modified_base 22..23: mod_base = OTHER; note = thymine
  misc_feature 1..23: note = Description of Artificial Sequence: Synthetic oligonucleotide
  source 1..23: mol_type = other RNA
gccttagattggatttcaagatt

SEQ ID NO: 666 - RNA, 23 nt, synthetic construct
  modified_base 22..23: mod_base = OTHER; note = thymine
  misc_feature 1..23: note = Description of Artificial Sequence: Synthetic oligonucleotide
  source 1..23: mol_type = other RNA
tggatttcaagaaacctttattt

SEQ ID NO: 667 - RNA, 23 nt, synthetic construct
  modified_base 22..23: mod_base = OTHER; note = thymine
  misc_feature 1..23: note = Description of Artificial Sequence: Synthetic oligonucleotide
  source 1..23: mol_type = other RNA
ctcagtcaatcgaggttttgatt

SEQ ID NO: 668 - RNA, 23 nt, synthetic construct
  modified_base 22..23: mod_base = OTHER; note = thymine
  misc_feature 1..23: note = Description of Artificial Sequence: Synthetic oligonucleotide
  source 1..23: mol_type = other RNA
acggagatatcagatacagaatt

SEQ ID NO: 669 - RNA, 23 nt, synthetic construct
  modified_base 22..23: mod_base = OTHER; note = thymine
  misc_feature 1..23: note = Description of Artificial Sequence: Synthetic oligonucleotide
  source 1..23: mol_type = other RNA
cggagatatcagatacagaaatt

SEQ ID NO: 670 - RNA, 23 nt, synthetic construct
  modified_base 22..23: mod_base = OTHER; note = thymine
  misc_feature 1..23: note = Description of Artificial Sequence: Synthetic oligonucleotide
  source 1..23: mol_type = other RNA
gagatatcagatacagaaaaatt

SEQ ID NO: 671 - RNA, 23 nt, synthetic construct
  modified_base 22..23: mod_base = OTHER; note = thymine
  misc_feature 1..23: note = Description of Artificial Sequence: Synthetic oligonucleotide
  source 1..23: mol_type = other RNA
cagatacagaaaaacattgattt

SEQ ID NO: 672 - RNA, 23 nt, synthetic construct
  modified_base 22..23: mod_base = OTHER; note = thymine
  misc_feature 1..23: note = Description of Artificial Sequence: Synthetic oligonucleotide
  source 1..23: mol_type = other RNA
gtccatgattctttcctttattt

SEQ ID NO: 673 - RNA, 23 nt, synthetic construct
  modified_base 22..23: mod_base = OTHER; note = thymine
  misc_feature 1..23: note = Description of Artificial Sequence: Synthetic oligonucleotide
  source 1..23: mol_type = other RNA
tccatgattctttcctttatttt

SEQ ID NO: 674 - RNA, 23 nt, synthetic construct
  modified_base 22..23: mod_base = OTHER; note = thymine
  misc_feature 1..23: note = Description of Artificial Sequence: Synthetic oligonucleotide
  source 1..23: mol_type = other RNA
ttctttcctttattatactgatt

SEQ ID NO: 675 - RNA, 23 nt, synthetic construct
  modified_base 22..23: mod_base = OTHER; note = thymine
  misc_feature 1..23: note = Description of Artificial Sequence: Synthetic oligonucleotide
  source 1..23: mol_type = other RNA
aacagtatgaggtcattgaaatt

SEQ ID NO: 676 - RNA, 23 nt, synthetic construct
  modified_base 22..23: mod_base = OTHER; note = thymine
  misc_feature 1..23: note = Description of Artificial Sequence: Synthetic oligonucleotide
  source 1..23: mol_type = other RNA
ttgagagataatgttccaaattt

SEQ ID NO: 677 - RNA, 23 nt, synthetic construct
  modified_base 22..23: mod_base = OTHER; note = thymine
  misc_feature 1..23: note = Description of Artificial Sequence: Synthetic oligonucleotide
  source 1..23: mol_type = other RNA
gagagataatgttccaaatcttt

SEQ ID NO: 678 - RNA, 23 nt, synthetic construct
  modified_base 22..23: mod_base = OTHER; note = thymine
  misc_feature 1..23: note = Description of Artificial Sequence: Synthetic oligonucleotide
  source 1..23: mol_type = other RNA
gagataatgttccaaatctgatt

SEQ ID NO: 679 - RNA, 21 nt, synthetic construct
  modified_base 20..21: mod_base = OTHER; note = thymine
  misc_feature 1..21: note = Description of Artificial Sequence: Synthetic oligonucleotide
  source 1..21: mol_type = other RNA
cctcaaatggctgtagcaatt

SEQ ID NO: 680 - RNA, 23 nt, synthetic construct
  modified_base 22..23: mod_base = OTHER; note = thymine
  misc_feature 1..23: note = Description of Artificial Sequence: Synthetic oligonucleotide
  source 1..23: mol_type = other RNA
ctctccatataactctttcattt

SEQ ID NO: 681 - RNA, 23 nt, synthetic construct
  modified_base 22..23: mod_base = OTHER; note = thymine
  misc_feature 1..23: note = Description of Artificial Sequence: Synthetic oligonucleotide
  source 1..23: mol_type = other RNA
tccatataactctttcattgttt

SEQ ID NO: 682 - RNA, 23 nt, synthetic construct
  modified_base 22..23: mod_base = OTHER; note = thymine
  misc_feature 1..23: note = Description of Artificial Sequence: Synthetic oligonucleotide
  source 1..23: mol_type = other RNA
aactctttcattgttgtttcatt

SEQ ID NO: 683 - RNA, 23 nt, synthetic construct
  modified_base 22..23: mod_base = OTHER; note = thymine
  misc_feature 1..23: note = Description of Artificial Sequence: Synthetic oligonucleotide
  source 1..23: mol_type = other RNA
ctctttcattgttgtttcaattt

SEQ ID NO: 684 - RNA, 23 nt, synthetic construct
  modified_base 22..23: mod_base = OTHER; note = thymine
  misc_feature 1..23: note = Description of Artificial Sequence: Synthetic oligonucleotide
  source 1..23: mol_type = other RNA
ctgcaatcagaggctttagcttt

SEQ ID NO: 685 - RNA, 23 nt, synthetic construct
  modified_base 22..23: mod_base = OTHER; note = thymine
  misc_feature 1..23: note = Description of Artificial Sequence: Synthetic oligonucleotide
  source 1..23: mol_type = other RNA
tgcaatcagaggctttagctttt

SEQ ID NO: 686 - RNA, 23 nt, synthetic construct
  modified_base 22..23: mod_base = OTHER; note = thymine
  misc_feature 1..23: note = Description of Artificial Sequence: Synthetic oligonucleotide
  source 1..23: mol_type = other RNA
gaggctttagcttggaattgttt

SEQ ID NO: 687 - RNA, 23 nt, synthetic construct
  modified_base 22..23: mod_base = OTHER; note = thymine
  misc_feature 1..23: note = Description of Artificial Sequence: Synthetic oligonucleotide
  source 1..23: mol_type = other RNA
ggctttagcttggaattgtcatt

SEQ ID NO: 688 - RNA, 23 nt, synthetic construct
  modified_base 22..23: mod_base = OTHER; note = thymine
  misc_feature 1..23: note = Description of Artificial Sequence: Synthetic oligonucleotide
  source 1..23: mol_type = other RNA
ttggaattgtcagatcattcatt

SEQ ID NO: 689 - RNA, 23 nt, synthetic construct
  modified_base 22..23: mod_base = OTHER; note = thymine
  misc_feature 1..23: note = Description of Artificial Sequence: Synthetic oligonucleotide
  source 1..23: mol_type = other RNA
tggatcttctctgatgaacattt

SEQ ID NO: 690 - RNA, 23 nt, synthetic construct
  modified_base 22..23: mod_base = OTHER; note = thymine
  misc_feature 1..23: note = Description of Artificial Sequence: Synthetic oligonucleotide
  source 1..23: mol_type = other RNA
aacattgtgacacatggaatatt

SEQ ID NO: 691 - RNA, 23 nt, synthetic construct
  modified_base 22..23: mod_base = OTHER; note = thymine
  misc_feature 1..23: note = Description of Artificial Sequence: Synthetic oligonucleotide
  source 1..23: mol_type = other RNA
ttctgaaacactgatagaagttt

SEQ ID NO: 692 - RNA, 23 nt, synthetic construct
  modified_base 22..23: mod_base = OTHER; note = thymine
  misc_feature 1..23: note = Description of Artificial Sequence: Synthetic oligonucleotide
  source 1..23: mol_type = other RNA
tagaagttctgcggatcaatatt

SEQ ID NO: 693 - RNA, 23 nt, synthetic construct
  modified_base 22..23: mod_base = OTHER; note = thymine
  misc_feature 1..23: note = Description of Artificial Sequence: Synthetic oligonucleotide
  source 1..23: mol_type = other RNA
ttgttgtagatcccaagaacatt

SEQ ID NO: 694 - RNA, 23 nt, synthetic construct
  modified_base 22..23: mod_base = OTHER; note = thymine
  misc_feature 1..23: note = Description of Artificial Sequence: Synthetic oligonucleotide
  source 1..23: mol_type = other RNA
accaaagattgagcgttcttttt

SEQ ID NO: 695 - RNA, 23 nt, synthetic construct
  modified_base 22..23: mod_base = OTHER; note = thymine
  misc_feature 1..23: note = Description of Artificial Sequence: Synthetic oligonucleotide
  source 1..23: mol_type = other RNA
ccgaagtgatggctacgtttatt

SEQ ID NO: 696 - RNA, 23 nt, synthetic construct
  modified_base 22..23: mod_base = OTHER; note = thymine
  misc_feature 1..23: note = Description of Artificial Sequence: Synthetic oligonucleotide
  source 1..23: mol_type = other RNA
tgggttgatgattctttagattt

SEQ ID NO: 697 - RNA, 23 nt, synthetic construct
  modified_base 22..23: mod_base = OTHER; note = thymine
  misc_feature 1..23: note = Description of Artificial Sequence: Synthetic oligonucleotide
  source 1..23: mol_type = other RNA
ttgatgattctttagatataatt

SEQ ID NO: 698 - RNA, 23 nt, synthetic construct
  modified_base 22..23: mod_base = OTHER; note = thymine
  misc_feature 1..23: note = Description of Artificial Sequence: Synthetic oligonucleotide
  source 1..23: mol_type = other RNA
cactgtttttgaaaattctattt

SEQ ID NO: 699 - RNA, 23 nt, synthetic construct
  modified_base 22..23: mod_base = OTHER; note = thymine
  misc_feature 1..23: note = Description of Artificial Sequence: Synthetic oligonucleotide
  source 1..23: mol_type = other RNA
ctgtttttgaaaattctatcatt

SEQ ID NO: 700 - RNA, 23 nt, synthetic construct
  modified_base 22..23: mod_base = OTHER; note = thymine
  misc_feature 1..23: note = Description of Artificial Sequence: Synthetic oligonucleotide
  source 1..23: mol_type = other RNA
tgggtagataggaatttgaaatt

SEQ ID NO: 701 - RNA, 23 nt, synthetic construct
  modified_base 22..23: mod_base = OTHER; note = thymine
  misc_feature 1..23: note = Description of Artificial Sequence: Synthetic oligonucleotide
  source 1..23: mol_type = other RNA
gggtagataggaatttgaaaatt

SEQ ID NO: 702 - RNA, 23 nt, synthetic construct
  modified_base 22..23: mod_base = OTHER; note = thymine
  misc_feature 1..23: note = Description of Artificial Sequence: Synthetic oligonucleotide
  source 1..23: mol_type = other RNA
cacagtgataagagacaatattt

SEQ ID NO: 703 - RNA, 23 nt, synthetic construct
  modified_base 22..23: mod_base = OTHER; note = thymine
  misc_feature 1..23: note = Description of Artificial Sequence: Synthetic oligonucleotide
  source 1..23: mol_type = other RNA
cagtgataagagacaatatcatt

SEQ ID NO: 704 - RNA, 23 nt, synthetic construct
  modified_base 22..23: mod_base = OTHER; note = thymine
  misc_feature 1..23: note = Description of Artificial Sequence: Synthetic oligonucleotide
  source 1..23: mol_type = other RNA
ggcaagaattgtgccatttcatt

SEQ ID NO: 705 - RNA, 23 nt, synthetic construct
  modified_base 22..23: mod_base = OTHER; note = thymine
  misc_feature 1..23: note = Description of Artificial Sequence: Synthetic oligonucleotide
  source 1..23: mol_type = other RNA
aagaattgtgccatttcaacatt

SEQ ID NO: 706 - RNA, 23 nt, synthetic construct
  modified_base 22..23: mod_base = OTHER; note = thymine
  misc_feature 1..23: note = Description of Artificial Sequence: Synthetic oligonucleotide
  source 1..23: mol_type = other RNA
gtgccatttcaacagaaaatttt

SEQ ID NO: 707 - RNA, 23 nt, synthetic construct
  modified_base 22..23: mod_base = OTHER; note = thymine
  misc_feature 1..23: note = Description of Artificial Sequence: Synthetic oligonucleotide
  source 1..23: mol_type = other RNA
tgccatttcaacagaaaattttt

SEQ ID NO: 708 - RNA, 23 nt, synthetic construct
  modified_base 22..23: mod_base = OTHER; note = thymine
  misc_feature 1..23: note = Description of Artificial Sequence: Synthetic oligonucleotide
  source 1..23: mol_type = other RNA
ctcatctttgccttgtctaattt

SEQ ID NO: 709 - RNA, 23 nt, synthetic construct
  modified_base 22..23: mod_base = OTHER; note = thymine
  misc_feature 1..23: note = Description of Artificial Sequence: Synthetic oligonucleotide
  source 1..23: mol_type = other RNA
acctttccaaacaataaatgttt

SEQ ID NO: 710 - RNA, 23 nt, synthetic construct
  modified_base 22..23: mod_base = OTHER; note = thymine
  misc_feature 1..23: note = Description of Artificial Sequence: Synthetic oligonucleotide
  source 1..23: mol_type = other RNA
gactatgacagtgtaagtgattt

SEQ ID NO: 711 - RNA, 23 nt, synthetic construct
  modified_base 22..23: mod_base = OTHER; note = thymine
  misc_feature 1..23: note = Description of Artificial Sequence: Synthetic oligonucleotide
  source 1..23: mol_type = other RNA
cagtgtaagtgatagaatctatt

SEQ ID NO: 712 - RNA, 23 nt, synthetic construct
  modified_base 22..23: mod_base = OTHER; note = thymine
  misc_feature 1..23: note = Description of Artificial Sequence: Synthetic oligonucleotide
  source 1..23: mol_type = other RNA
gtgtaagtgatagaatctacttt

SEQ ID NO: 713 - RNA, 23 nt, synthetic construct
  modified_base 22..23: mod_base = OTHER; note = thymine
  misc_feature 1..23: note = Description of Artificial Sequence: Synthetic oligonucleotide
  source 1..23: mol_type = other RNA
tagaatctacttcacacaaaatt

SEQ ID NO: 714 - RNA, 23 nt, synthetic construct
  modified_base 22..23: mod_base = OTHER; note = thymine
  misc_feature 1..23: note = Description of Artificial Sequence: Synthetic oligonucleotide
  source 1..23: mol_type = other RNA
atctacttcacacaaaatttatt

SEQ ID NO: 715 - RNA, 23 nt, synthetic construct
  modified_base 22..23: mod_base = OTHER; note = thymine
  misc_feature 1..23: note = Description of Artificial Sequence: Synthetic oligonucleotide
  source 1..23: mol_type = other RNA
gcctttgactggattactagatt

SEQ ID NO: 716 - RNA, 23 nt, synthetic construct
  modified_base 22..23: mod_base = OTHER; note = thymine
  misc_feature 1..23: note = Description of Artificial Sequence: Synthetic oligonucleotide
  source 1..23: mol_type = other RNA
gactggattactagaagaatttt

SEQ ID NO: 717 - RNA, 23 nt, synthetic construct
  modified_base 22..23: mod_base = OTHER; note = thymine
  misc_feature 1..23: note = Description of Artificial Sequence: Synthetic oligonucleotide
  source 1..23: mol_type = other RNA
ctggattactagaagaatttatt

SEQ ID NO: 718 - RNA, 23 nt, synthetic construct
  modified_base 22..23: mod_base = OTHER; note = thymine
  misc_feature 1..23: note = Description of Artificial Sequence: Synthetic oligonucleotide
  source 1..23: mol_type = other RNA
tggattactagaagaatttattt

SEQ ID NO: 719 - RNA, 23 nt, synthetic construct
  modified_base 22..23: mod_base = OTHER; note = thymine
  misc_feature 1..23: note = Description of Artificial Sequence: Synthetic oligonucleotide
  source 1..23: mol_type = other RNA
gactctctatggccagtatattt

SEQ ID NO: 720 - RNA, 23 nt, synthetic construct
  modified_base 22..23: mod_base = OTHER; note = thymine
  misc_feature 1..23: note = Description of Artificial Sequence: Synthetic oligonucleotide
  source 1..23: mol_type = other RNA
ctgacttgtacacacaaagaatt

SEQ ID NO: 721 - RNA, 23 nt, synthetic construct
  modified_base 22..23: mod_base = OTHER; note = thymine
  misc_feature 1..23: note = Description of Artificial Sequence: Synthetic oligonucleotide
  source 1..23: mol_type = other RNA
gacttgtacacacaaagaatttt

SEQ ID NO: 722 - RNA, 23 nt, synthetic construct
  modified_base 22..23: mod_base = OTHER; note = thymine
  misc_feature 1..23: note = Description of Artificial Sequence: Synthetic oligonucleotide
  source 1..23: mol_type = other RNA
tacacacaaagaatttaccgatt

SEQ ID NO: 723 - RNA, 23 nt, synthetic construct
  modified_base 22..23: mod_base = OTHER; note = thymine
  misc_feature 1..23: note = Description of Artificial Sequence: Synthetic oligonucleotide
  source 1..23: mol_type = other RNA
accagaaacaacagtgtaacatt

SEQ ID NO: 724 - RNA, 23 nt, synthetic construct
  modified_base 22..23: mod_base = OTHER; note = thymine
  misc_feature 1..23: note = Description of Artificial Sequence: Synthetic oligonucleotide
  source 1..23: mol_type = other RNA
cagaaacaacagtgtaacaattt

SEQ ID NO: 725 - RNA, 23 nt, synthetic construct
  modified_base 22..23: mod_base = OTHER; note = thymine
  misc_feature 1..23: note = Description of Artificial Sequence: Synthetic oligonucleotide
  source 1..23: mol_type = other RNA
aacaatccttgtgaacagttttt

SEQ ID NO: 726 - RNA, 23 nt, synthetic construct
  modified_base 22..23: mod_base = OTHER; note = thymine
  misc_feature 1..23: note = Description of Artificial Sequence: Synthetic oligonucleotide
  source 1..23: mol_type = other RNA
gtggacaatggtgaacgatgttt

SEQ ID NO: 727 - RNA, 23 nt, synthetic construct
  modified_base 22..23: mod_base = OTHER; note = thymine
  misc_feature 1..23: note = Description of Artificial Sequence: Synthetic oligonucleotide
  source 1..23: mol_type = other RNA
cggagtttatgtgcaataacatt

SEQ ID NO: 728 - RNA, 23 nt, synthetic construct
  modified_base 22..23: mod_base = OTHER; note = thymine
  misc_feature 1..23: note = Description of Artificial Sequence: Synthetic oligonucleotide
  source 1..23: mol_type = other RNA
gagtttatgtgcaataacagatt

SEQ ID NO: 729 - RNA, 23 nt, synthetic construct
  modified_base 22..23: mod_base = OTHER; note = thymine
  misc_feature 1..23: note = Description of Artificial Sequence: Synthetic oligonucleotide
  source 1..23: mol_type = other RNA
tggatacacaaaatgtcataatt

SEQ ID NO: 730 - RNA, 23 nt, synthetic construct
  modified_base 22..23: mod_base = OTHER; note = thymine
  misc_feature 1..23: note = Description of Artificial Sequence: Synthetic oligonucleotide
  source 1..23: mol_type = other RNA
tacacaaaatgtcataattcatt

SEQ ID NO: 731 - RNA, 23 nt, synthetic construct
  modified_base 22..23: mod_base = OTHER; note = thymine
  misc_feature 1..23: note = Description of Artificial Sequence: Synthetic oligonucleotide
  source 1..23: mol_type = other RNA
cacaaaatgtcataattcaaatt

SEQ ID NO: 732 - RNA, 23 nt, synthetic construct
  modified_base 22..23: mod_base = OTHER; note = thymine
  misc_feature 1..23: note = Description of Artificial Sequence: Synthetic oligonucleotide
  source 1..23: mol_type = other RNA
gtcataattcaaatatttgtatt

SEQ ID NO: 733 - RNA, 23 nt, synthetic construct
  modified_base 22..23: mod_base = OTHER; note = thymine
  misc_feature 1..23: note = Description of Artificial Sequence: Synthetic oligonucleotide
  source 1..23: mol_type = other RNA
ttgtattcctcgcgtttattttt

SEQ ID NO: 734 - RNA, 23 nt, synthetic construct
  modified_base 22..23: mod_base = OTHER; note = thymine
  misc_feature 1..23: note = Description of Artificial Sequence: Synthetic oligonucleotide
  source 1..23: mol_type = other RNA
gtgatgaaaaccctacttatttt

SEQ ID NO: 735 - RNA, 23 nt, synthetic construct
  modified_base 22..23: mod_base = OTHER; note = thymine
  misc_feature 1..23: note = Description of Artificial Sequence: Synthetic oligonucleotide
  source 1..23: mol_type = other RNA
tcctcaacattggtattgtgatt

SEQ ID NO: 736 - RNA, 23 nt, synthetic construct
  modified_base 22..23: mod_base = OTHER; note = thymine
  misc_feature 1..23: note = Description of Artificial Sequence: Synthetic oligonucleotide
  source 1..23: mol_type = other RNA
tggtattgtgatcaagaaacatt

SEQ ID NO: 737 - RNA, 23 nt, synthetic construct
  modified_base 22..23: mod_base = OTHER; note = thymine
  misc_feature 1..23: note = Description of Artificial Sequence: Synthetic oligonucleotide
  source 1..23: mol_type = other RNA
gtgatcaagaaacagattgtttt

SEQ ID NO: 738 - RNA, 23 nt, synthetic construct
  modified_base 22..23: mod_base = OTHER; note = thymine
  misc_feature 1..23: note = Description of Artificial Sequence: Synthetic oligonucleotide
  source 1..23: mol_type = other RNA
ttccgagtttctctgtgtaaatt

SEQ ID NO: 739 - RNA, 23 nt, synthetic construct
  modified_base 22..23: mod_base = OTHER; note = thymine
  misc_feature 1..23: note = Description of Artificial Sequence: Synthetic oligonucleotide
  source 1..23: mol_type = other RNA
tccgagtttctctgtgtaaattt

SEQ ID NO: 740 - RNA, 23 nt, synthetic construct
  modified_base 22..23: mod_base = OTHER; note = thymine
  misc_feature 1..23: note = Description of Artificial Sequence: Synthetic oligonucleotide
  source 1..23: mol_type = other RNA
cggctacgatgagaatcagaatt

SEQ ID NO: 741 - RNA, 23 nt, synthetic construct
  modified_base 22..23: mod_base = OTHER; note = thymine
  misc_feature 1..23: note = Description of Artificial Sequence: Synthetic oligonucleotide
  source 1..23: mol_type = other RNA
aggagaacttgctctgaaaattt

SEQ ID NO: 742 - RNA, 23 nt, synthetic construct
  modified_base 22..23: mod_base = OTHER; note = thymine
  misc_feature 1..23: note = Description of Artificial Sequence: Synthetic oligonucleotide
  source 1..23: mol_type = other RNA
gactgtgtatcccaaagatattt

SEQ ID NO: 743 - RNA, 23 nt, synthetic construct
  modified_base 22..23: mod_base = OTHER; note = thymine
  misc_feature 1..23: note = Description of Artificial Sequence: Synthetic oligonucleotide
  source 1..23: mol_type = other RNA
gccaacagaatcagtttaccttt

SEQ ID NO: 744 - RNA, 23 nt, synthetic construct
  modified_base 22..23: mod_base = OTHER; note = thymine
  misc_feature 1..23: note = Description of Artificial Sequence: Synthetic oligonucleotide
  source 1..23: mol_type = other RNA
gacaccttaaccagtttctattt

SEQ ID NO: 745 - RNA, 23 nt, synthetic construct
  modified_base 22..23: mod_base = OTHER; note = thymine
  misc_feature 1..23: note = Description of Artificial Sequence: Synthetic oligonucleotide
  source 1..23: mol_type = other RNA
accttaaccagtttctattgttt

SEQ ID NO: 746 - RNA, 23 nt, synthetic construct
  modified_base 22..23: mod_base = OTHER; note = thymine
  misc_feature 1..23: note = Description of Artificial Sequence: Synthetic oligonucleotide
  source 1..23: mol_type = other RNA
gacttgtgttgatattgatgatt

SEQ ID NO: 747 - RNA, 23 nt, synthetic construct
  modified_base 22..23: mod_base = OTHER; note = thymine
  misc_feature 1..23: note = Description of Artificial Sequence: Synthetic oligonucleotide
  source 1..23: mol_type = other RNA
atgtaataggctcctacatcttt

SEQ ID NO: 748 - RNA, 23 nt, synthetic construct
  modified_base 22..23: mod_base = OTHER; note = thymine
  misc_feature 1..23: note = Description of Artificial Sequence: Synthetic oligonucleotide
  source 1..23: mol_type = other RNA
ccggcaaaacagtaacatcgatt

SEQ ID NO: 749 - RNA, 23 nt, synthetic construct
  modified_base 22..23: mod_base = OTHER; note = thymine
  misc_feature 1..23: note = Description of Artificial Sequence: Synthetic oligonucleotide
  source 1..23: mol_type = other RNA
accctatctcatttttagcaatt

SEQ ID NO: 750 - RNA, 23 nt, synthetic construct
  modified_base 22..23: mod_base = OTHER; note = thymine
  misc_feature 1..23: note = Description of Artificial Sequence: Synthetic oligonucleotide
  source 1..23: mol_type = other RNA
aaccgttactatttgagaaattt

SEQ ID NO: 751 - RNA, 23 nt, synthetic construct
  modified_base 22..23: mod_base = OTHER; note = thymine
  misc_feature 1..23: note = Description of Artificial Sequence: Synthetic oligonucleotide
  source 1..23: mol_type = other RNA
accgttactatttgagaaatttt

SEQ ID NO: 752 - RNA, 23 nt, synthetic construct
  modified_base 22..23: mod_base = OTHER; note = thymine
  misc_feature 1..23: note = Description of Artificial Sequence: Synthetic oligonucleotide
  source 1..23: mol_type = other RNA
ccgttactatttgagaaattttt

SEQ ID NO: 753 - RNA, 23 nt, synthetic construct
  modified_base 22..23: mod_base = OTHER; note = thymine
  misc_feature 1..23: note = Description of Artificial Sequence: Synthetic oligonucleotide
  source 1..23: mol_type = other RNA
tactatttgagaaatttaacttt

SEQ ID NO: 754 - RNA, 23 nt, synthetic construct
  modified_base 22..23: mod_base = OTHER; note = thymine
  misc_feature 1..23: note = Description of Artificial Sequence: Synthetic oligonucleotide
  source 1..23: mol_type = other RNA
ttgagaaatttaactatagattt

SEQ ID NO: 755 - RNA, 23 nt, synthetic construct
  modified_base 22..23: mod_base = OTHER; note = thymine
  misc_feature 1..23: note = Description of Artificial Sequence: Synthetic oligonucleotide
  source 1..23: mol_type = other RNA
aactatagatggctatttttatt

SEQ ID NO: 756 - RNA, 23 nt, synthetic construct
  modified_base 22..23: mod_base = OTHER; note = thymine
  misc_feature 1..23: note = Description of Artificial Sequence: Synthetic oligonucleotide
  source 1..23: mol_type = other RNA
gacaatgttgtggcattagattt

SEQ ID NO: 757 - RNA, 23 nt, synthetic construct
  modified_base 22..23: mod_base = OTHER; note = thymine
  misc_feature 1..23: note = Description of Artificial Sequence: Synthetic oligonucleotide
  source 1..23: mol_type = other RNA
gagaagagattgtattggatttt

SEQ ID NO: 758 - RNA, 23 nt, synthetic construct
  modified_base 22..23: mod_base = OTHER; note = thymine
  misc_feature 1..23: note = Description of Artificial Sequence: Synthetic oligonucleotide
  source 1..23: mol_type = other RNA
ggcaagtcattgagagaatgttt

SEQ ID NO: 759 - RNA, 23 nt, synthetic construct
  modified_base 22..23: mod_base = OTHER; note = thymine
  misc_feature 1..23: note = Description of Artificial Sequence: Synthetic oligonucleotide
  source 1..23: mol_type = other RNA
gacaaacaaggagacaatcattt

SEQ ID NO: 760 - RNA, 23 nt, synthetic construct
  modified_base 22..23: mod_base = OTHER; note = thymine
  misc_feature 1..23: note = Description of Artificial Sequence: Synthetic oligonucleotide
  source 1..23: mol_type = other RNA
aaccaacaagtctgtgataattt

SEQ ID NO: 761 - RNA, 23 nt, synthetic construct
  modified_base 22..23: mod_base = OTHER; note = thymine
  misc_feature 1..23: note = Description of Artificial Sequence: Synthetic oligonucleotide
  source 1..23: mol_type = other RNA
ttcgctattaccatttttgaatt

SEQ ID NO: 762 - RNA, 23 nt, synthetic construct
  modified_base 22..23: mod_base = OTHER; note = thymine
  misc_feature 1..23: note = Description of Artificial Sequence: Synthetic oligonucleotide
  source 1..23: mol_type = other RNA
cgctattaccatttttgaagatt

SEQ ID NO: 763 - RNA, 23 nt, synthetic construct
  modified_base 22..23: mod_base = OTHER; note = thymine
  misc_feature 1..23: note = Description of Artificial Sequence: Synthetic oligonucleotide
  source 1..23: mol_type = other RNA
cagtggaaaagggaaacaaattt

SEQ ID NO: 764 - RNA, 23 nt, synthetic construct
  modified_base 22..23: mod_base = OTHER; note = thymine
  misc_feature 1..23: note = Description of Artificial Sequence: Synthetic oligonucleotide
  source 1..23: mol_type = other RNA
aacaaatatgatggatcaaattt

SEQ ID NO: 765 - RNA, 23 nt, synthetic construct
  modified_base 22..23: mod_base = OTHER; note = thymine
  misc_feature 1..23: note = Description of Artificial Sequence: Synthetic oligonucleotide
  source 1..23: mol_type = other RNA
tccatgtgtaccatccatatatt

SEQ ID NO: 766 - RNA, 23 nt, synthetic construct
  modified_base 22..23: mod_base = OTHER; note = thymine
  misc_feature 1..23: note = Description of Artificial Sequence: Synthetic oligonucleotide
  source 1..23: mol_type = other RNA
ctgatgaagaccgtcttcttttt

SEQ ID NO: 767 - RNA, 23 nt, synthetic construct
  modified_base 22..23: mod_base = OTHER; note = thymine
  misc_feature 1..23: note = Description of Artificial Sequence: Synthetic oligonucleotide
  source 1..23: mol_type = other RNA
gtgacaacttcacagaattcatt

SEQ ID NO: 768 - RNA, 23 nt, synthetic construct
  modified_base 22..23: mod_base = OTHER; note = thymine
  misc_feature 1..23: note = Description of Artificial Sequence: Synthetic oligonucleotide
  source 1..23: mol_type = other RNA
cggtgtacaagtggacattgttt

SEQ ID NO: 769 - RNA, 23 nt, synthetic construct
  modified_base 22..23: mod_base = OTHER; note = thymine
  misc_feature 1..23: note = Description of Artificial Sequence: Synthetic oligonucleotide
  source 1..23: mol_type = other RNA
gtgtacaagtggacattgtgttt

SEQ ID NO: 770 - RNA, 23 nt, synthetic construct
  modified_base 22..23: mod_base = OTHER; note = thymine
  misc_feature 1..23: note = Description of Artificial Sequence: Synthetic oligonucleotide
  source 1..23: mol_type = other RNA
tactatgttcgaatgcaaaaatt

SEQ ID NO: 771 - RNA, 23 nt, synthetic construct
  modified_base 22..23: mod_base = OTHER; note = thymine
  misc_feature 1..23: note = Description of Artificial Sequence: Synthetic oligonucleotide
  source 1..23: mol_type = other RNA
atgttcgaatgcaaaaaccattt

SEQ ID NO: 772 - RNA, 23 nt, synthetic construct
  modified_base 22..23: mod_base = OTHER; note = thymine
  misc_feature 1..23: note = Description of Artificial Sequence: Synthetic oligonucleotide
  source 1..23: mol_type = other RNA
atgcaaaaaccatgtttgtattt

SEQ ID NO: 773 - RNA, 23 nt, synthetic construct
  modified_base 22..23: mod_base = OTHER; note = thymine
  misc_feature 1..23: note = Description of Artificial Sequence: Synthetic oligonucleotide
  source 1..23: mol_type = other RNA
ccgccatattggaaatgtgattt

SEQ ID NO: 774 - RNA, 23 nt, synthetic construct
  modified_base 22..23: mod_base = OTHER; note = thymine
  misc_feature 1..23: note = Description of Artificial Sequence: Synthetic oligonucleotide
  source 1..23: mol_type = other RNA
tggttcagatgaagaacttcatt

SEQ ID NO: 775 - RNA, 23 nt, synthetic construct
  modified_base 22..23: mod_base = OTHER; note = thymine
  misc_feature 1..23: note = Description of Artificial Sequence: Synthetic oligonucleotide
  source 1..23: mol_type = other RNA
gacaacaatcgctgcatttattt

SEQ ID NO: 776 - RNA, 23 nt, synthetic construct
  modified_base 22..23: mod_base = OTHER; note = thymine
  misc_feature 1..23: note = Description of Artificial Sequence: Synthetic oligonucleotide
  source 1..23: mol_type = other RNA
cccctaaaccttgtacagaattt

SEQ ID NO: 777 - RNA, 23 nt, synthetic construct
  modified_base 22..23: mod_base = OTHER; note = thymine
  misc_feature 1..23: note = Description of Artificial Sequence: Synthetic oligonucleotide
  source 1..23: mol_type = other RNA
ccctaaaccttgtacagaatatt

SEQ ID NO: 778 - RNA, 23 nt, synthetic construct
  modified_base 22..23: mod_base = OTHER; note = thymine
  misc_feature 1..23: note = Description of Artificial Sequence: Synthetic oligonucleotide
  source 1..23: mol_type = other RNA
aaccttgtacagaatatgaattt

SEQ ID NO: 779 - RNA, 23 nt, synthetic construct
  modified_base 22..23: mod_base = OTHER; note = thymine
  misc_feature 1..23: note = Description of Artificial Sequence: Synthetic oligonucleotide
  source 1..23: mol_type = other RNA
accttgtacagaatatgaatatt

SEQ ID NO: 780 - RNA, 23 nt, synthetic construct
  modified_base 22..23: mod_base = OTHER; note = thymine
  misc_feature 1..23: note = Description of Artificial Sequence: Synthetic oligonucleotide
  source 1..23: mol_type = other RNA
ttgtacagaatatgaatataatt

SEQ ID NO: 781 - RNA, 23 nt, synthetic construct
  modified_base 22..23: mod_base = OTHER; note = thymine
  misc_feature 1..23: note = Description of Artificial Sequence: Synthetic oligonucleotide
  source 1..23: mol_type = other RNA
ccgatgaactgggttgcaatatt

SEQ ID NO: 782 - RNA, 23 nt, synthetic construct
  modified_base 22..23: mod_base = OTHER; note = thymine
  misc_feature 1..23: note = Description of Artificial Sequence: Synthetic oligonucleotide
  source 1..23: mol_type = other RNA
aagaacatgtgctgaaaatattt

SEQ ID NO: 783 - RNA, 23 nt, synthetic construct
  modified_base 22..23: mod_base = OTHER; note = thymine
  misc_feature 1..23: note = Description of Artificial Sequence: Synthetic oligonucleotide
  source 1..23: mol_type = other RNA
agcaaaattgtacccaattaatt

SEQ ID NO: 784 - RNA, 23 nt, synthetic construct
  modified_base 22..23: mod_base = OTHER; note = thymine
  misc_feature 1..23: note = Description of Artificial Sequence: Synthetic oligonucleotide
  source 1..23: mol_type = other RNA
gggttcgaaaccaatgttttttt

SEQ ID NO: 785 - RNA, 23 nt, synthetic construct
  modified_base 22..23: mod_base = OTHER; note = thymine
  misc_feature 1..23: note = Description of Artificial Sequence: Synthetic oligonucleotide
  source 1..23: mol_type = other RNA
tcgaaaccaatgtttttgacatt

SEQ ID NO: 786 - RNA, 23 nt, synthetic construct
  modified_base 22..23: mod_base = OTHER; note = thymine
  misc_feature 1..23: note = Description of Artificial Sequence: Synthetic oligonucleotide
  source 1..23: mol_type = other RNA
ctgacaatgtccgaattcgaatt

SEQ ID NO: 787 - RNA, 23 nt, synthetic construct
  modified_base 22..23: mod_base = OTHER; note = thymine
  misc_feature 1..23: note = Description of Artificial Sequence: Synthetic oligonucleotide
  source 1..23: mol_type = other RNA
gtccgaattcgaaaatataattt

SEQ ID NO: 788 - RNA, 23 nt, synthetic construct
  modified_base 22..23: mod_base = OTHER; note = thymine
  misc_feature 1..23: note = Description of Artificial Sequence: Synthetic oligonucleotide
  source 1..23: mol_type = other RNA
ccgaattcgaaaatataatcttt

SEQ ID NO: 789 - RNA, 23 nt, synthetic construct
  modified_base 22..23: mod_base = OTHER; note = thymine
  misc_feature 1..23: note = Description of Artificial Sequence: Synthetic oligonucleotide
  source 1..23: mol_type = other RNA
ctcagagtatcttcaagatgatt

SEQ ID NO: 790 - RNA, 23 nt, synthetic construct
  modified_base 22..23: mod_base = OTHER; note = thymine
  misc_feature 1..23: note = Description of Artificial Sequence: Synthetic oligonucleotide
  source 1..23: mol_type = other RNA
atcttcaagatgaggaatatatt

SEQ ID NO: 791 - RNA, 27 nt, synthetic construct
  modified_base 26..27: mod_base = OTHER; note = thymine
  misc_feature 1..27: note = Description of Artificial Sequence: Synthetic oligonucleotide
  source 1..27: mol_type = other RNA
gggctctaggtttggtgctatcaaatt

SEQ ID NO: 792 - RNA, 27 nt, synthetic construct
  modified_base 26..27: mod_base = OTHER; note = thymine
  misc_feature 1..27: note = Description of Artificial Sequence: Synthetic oligonucleotide
  source 1..27: mol_type = other RNA
gggctctaggtttggtgctatcaaatt

SEQ ID NO: 793 - RNA, 27 nt, synthetic construct
  modified_base 26..27: mod_base = OTHER; note = thymine
  misc_feature 1..27: note = Description of Artificial Sequence: Synthetic oligonucleotide
  source 1..27: mol_type = other RNA
gggctctaggtttggtgctatcaaatt

SEQ ID NO: 794 - RNA, 25 nt, synthetic construct
  misc_feature 1..25: note = Description of Artificial Sequence: Synthetic oligonucleotide
  source 1..25: mol_type = other RNA
gggctctaggtttggtgctatcaaa

SEQ ID NO: 795 - RNA, 27 nt, synthetic construct
  modified_base 26..27: mod_base = OTHER; note = thymine
  misc_feature 1..27: note = Description of Artificial Sequence: Synthetic oligonucleotide
  source 1..27: mol_type = other RNA
gggctctaggtttggtgctatcaaatt

SEQ ID NO: 796 - RNA, 25 nt, synthetic construct
  misc_feature 1..25: note = Description of Artificial Sequence: Synthetic oligonucleotide
  source 1..25: mol_type = other RNA
gggctctaggtttggtgctatcaaa

SEQ ID NO: 797 - RNA, 27 nt, synthetic construct
  modified_base 26..27: mod_base = OTHER; note = thymine
  misc_feature 1..27: note = Description of Artificial Sequence: Synthetic oligonucleotide
  source 1..27: mol_type = other RNA
gggctctaggtttggtgctatcaaatt

SEQ ID NO: 798 - RNA, 27 nt, synthetic construct
  modified_base 26..27: mod_base = OTHER; note = thymine
  misc_feature 1..27: note = Description of Artificial Sequence: Synthetic oligonucleotide
  source 1..27: mol_type = other RNA
gggctctaggtttggtgctatcaaatt

SEQ ID NO: 799 - RNA, 27 nt, synthetic construct
  modified_base 26..27: mod_base = OTHER; note = thymine
  misc_feature 1..27: note = Description of Artificial Sequence: Synthetic oligonucleotide
  source 1..27: mol_type = other RNA
gggctctaggtttggtgctatcaaatt

SEQ ID NO: 800 - RNA, 25 nt, synthetic construct
  misc_feature 1..25: note = Description of Artificial Sequence: Synthetic oligonucleotide
  source 1..25: mol_type = other RNA
gggctctaggtttggtgctatcaaa

SEQ ID NO: 801 - RNA, 25 nt, synthetic construct
  misc_feature 1..25: note = Description of Artificial Sequence: Synthetic oligonucleotide
  source 1..25: mol_type = other RNA
gggctctaggtttggtgctatcaaa

SEQ ID NO: 802 - RNA, 27 nt, synthetic construct
  modified_base 26..27: mod_base = OTHER; note = thymine
  misc_feature 1..27: note = Description of Artificial Sequence: Synthetic oligonucleotide
  source 1..27: mol_type = other RNA
gggctctaggtttggtgctatcaaatt

SEQ ID NO: 803 - RNA, 25 nt, synthetic construct
  misc_feature 1..25: note = Description of Artificial Sequence: Synthetic oligonucleotide
  source 1..25: mol_type = other RNA
gggctctaggtttggtgctatcaaa

SEQ ID NO: 804 - RNA, 23 nt, synthetic construct
  modified_base 22..23: mod_base = OTHER; note = thymine
  misc_feature 1..23: note = Description of Artificial Sequence: Synthetic oligonucleotide
  source 1..23: mol_type = other RNA
tctaggtttggtgctatcaaatt

SEQ ID NO: 805 - RNA, 17 nt, synthetic construct
  modified_base 16..17: mod_base = OTHER; note = thymine
  misc_feature 1..17: note = Description of Artificial Sequence: Synthetic oligonucleotide
  source 1..17: mol_type = other RNA
tttggtgctatcaaatt

SEQ ID NO: 806 - RNA, 17 nt, synthetic construct
  modified_base 16..17: mod_base = OTHER; note = thymine
  misc_feature 1..17: note = Description of Artificial Sequence: Synthetic oligonucleotide
  source 1..17: mol_type = other RNA
tttggtgctatcaaatt

SEQ ID NO: 807 - RNA, 15 nt, synthetic construct
  misc_feature 1..15: note = Description of Artificial Sequence: Synthetic oligonucleotide
  source 1..15: mol_type = other RNA
tttggtgctatcaaa

SEQ ID NO: 808 - RNA, 15 nt, synthetic construct
  misc_feature 1..15: note = Description of Artificial Sequence: Synthetic oligonucleotide
  source 1..15: mol_type = other RNA
tttggtgctatcaaa

SEQ ID NO: 809 - RNA, 23 nt, synthetic construct
  modified_base 22..23: mod_base = OTHER; note = thymine
  misc_feature 1..23: note = Description of Artificial Sequence: Synthetic oligonucleotide
  source 1..23: mol_type = other RNA
tgcctacatccccaactttgatt

SEQ ID NO: 810 - RNA, 23 nt, synthetic construct
  modified_base 22..23: mod_base = OTHER; note = thymine
  misc_feature 1..23: note = Description of Artificial Sequence: Synthetic oligonucleotide
  source 1..23: mol_type = other RNA
aggaagttgacctgaaactgatt

SEQ ID NO: 811 - RNA, 23 nt, synthetic construct
  modified_base 22..23: mod_base = OTHER; note = thymine
  misc_feature 1..23: note = Description of Artificial Sequence: Synthetic oligonucleotide
  source 1..23: mol_type = other RNA
gacctgaaactgaaatacgtatt

SEQ ID NO: 812 - RNA, 23 nt, synthetic construct
  modified_base 22..23: mod_base = OTHER; note = thymine
  misc_feature 1..23: note = Description of Artificial Sequence: Synthetic oligonucleotide
  source 1..23: mol_type = other RNA
acctgaaactgaaatacgtaatt

SEQ ID NO: 813 - RNA, 23 nt, synthetic construct
  modified_base 22..23: mod_base = OTHER; note = thymine
  misc_feature 1..23: note = Description of Artificial Sequence: Synthetic oligonucleotide
  source 1..23: mol_type = other RNA
acgcattgaggtggctaaacttt

SEQ ID NO: 814 - RNA, 23 nt, synthetic construct
  modified_base 22..23: mod_base = OTHER; note = thymine
  misc_feature 1..23: note = Description of Artificial Sequence: Synthetic oligonucleotide
  source 1..23: mol_type = other RNA
tcccaaactagggcttatgtttt

SEQ ID NO: 815 - RNA, 23 nt, synthetic construct
  modified_base 22..23: mod_base = OTHER; note = thymine
  misc_feature 1..23: note = Description of Artificial Sequence: Synthetic oligonucleotide
  source 1..23: mol_type = other RNA
gggaaaggaacctaaaatcgatt

SEQ ID NO: 816 - RNA, 23 nt, synthetic construct
  modified_base 22..23: mod_base = OTHER; note = thymine
  misc_feature 1..23: note = Description of Artificial Sequence: Synthetic oligonucleotide
  source 1..23: mol_type = other RNA
ccgcaacatcctggttttcgatt

SEQ ID NO: 817 - RNA, 23 nt, synthetic construct
  modified_base 22..23: mod_base = OTHER; note = thymine
  misc_feature 1..23: note = Description of Artificial Sequence: Synthetic oligonucleotide
  source 1..23: mol_type = other RNA
gcctttctatcgattatttgatt

SEQ ID NO: 818 - RNA, 23 nt, synthetic construct
  modified_base 22..23: mod_base = OTHER; note = thymine
  misc_feature 1..23: note = Description of Artificial Sequence: Synthetic oligonucleotide
  source 1..23: mol_type = other RNA
ttctatcgattatttgaacaatt

SEQ ID NO: 819 - RNA, 23 nt, synthetic construct
  modified_base 22..23: mod_base = OTHER; note = thymine
  misc_feature 1..23: note = Description of Artificial Sequence: Synthetic oligonucleotide
  source 1..23: mol_type = other RNA
aggacgttattgaaaccataatt

SEQ ID NO: 820 - RNA, 23 nt, synthetic construct
  modified_base 22..23: mod_base = OTHER; note = thymine
  misc_feature 1..23: note = Description of Artificial Sequence: Synthetic oligonucleotide
  source 1..23: mol_type = other RNA
gacgttattgaaaccataaaatt

SEQ ID NO: 821 - RNA, 23 nt, synthetic construct
  modified_base 22..23: mod_base = OTHER; note = thymine
  misc_feature 1..23: note = Description of Artificial Sequence: Synthetic oligonucleotide
  source 1..23: mol_type = other RNA
acgttattgaaaccataaaattt

SEQ ID NO: 822 - RNA, 27 nt, synthetic construct
  modified_base 26..27: mod_base = OTHER; note = thymine
  misc_feature 1..27: note = Description of Artificial Sequence: Synthetic oligonucleotide
  source 1..27: mol_type = other RNA
ggactgataggagagtcattgcaaatt

SEQ ID NO: 823 - RNA, 27 nt, synthetic construct
  modified_base 26..27: mod_base = OTHER; note = thymine
  misc_feature 1..27: note = Description of Artificial Sequence: Synthetic oligonucleotide
  source 1..27: mol_type = other RNA
ggactgataggagagtcattgcaaatt

SEQ ID NO: 824 - RNA, 27 nt, synthetic construct
  modified_base 26..27: mod_base = OTHER; note = thymine
  misc_feature 1..27: note = Description of Artificial Sequence: Synthetic oligonucleotide
  source 1..27: mol_type = other RNA
ggactgataggagagtcattgcaaatt

SEQ ID NO: 825 - RNA, 25 nt, synthetic construct
  misc_feature 1..25: note = Description of Artificial Sequence: Synthetic oligonucleotide
  source 1..25: mol_type = other RNA
ggactgataggagagtcattgcaaa

SEQ ID NO: 826 - RNA, 27 nt, synthetic construct
  modified_base 26..27: mod_base = OTHER; note = thymine
  misc_feature 1..27: note = Description of Artificial Sequence: Synthetic oligonucleotide
  source 1..27: mol_type = other RNA
ggactgataggagagtcattgcaaatt

SEQ ID NO: 827 - RNA, 25 nt, synthetic construct
  misc_feature 1..25: note = Description of Artificial Sequence: Synthetic oligonucleotide
  source 1..25: mol_type = other RNA
ggactgataggagagtcattgcaaa

SEQ ID NO: 828 - RNA, 27 nt, synthetic construct
  modified_base 26..27: mod_base = OTHER; note = thymine
  misc_feature 1..27: note = Description of Artificial Sequence: Synthetic oligonucleotide
  source 1..27: mol_type = other RNA
ggactgataggagagtcattgcaaatt

SEQ ID NO: 829 - RNA, 27 nt, synthetic construct
  modified_base 26..27: mod_base = OTHER; note = thymine
  misc_feature 1..27: note = Description of Artificial Sequence: Synthetic oligonucleotide
  source 1..27: mol_type = other RNA
ggactgataggagagtcattgcaaatt

SEQ ID NO: 830 - RNA, 27 nt, synthetic construct
  modified_base 26..27: mod_base = OTHER; note = thymine
  misc_feature 1..27: note = Description of Artificial Sequence: Synthetic oligonucleotide
  source 1..27: mol_type = other RNA
ggactgataggagagtcattgcaaatt

SEQ ID NO: 831 - RNA, 25 nt, synthetic construct
  misc_feature 1..25: note = Description of Artificial Sequence: Synthetic oligonucleotide
  source 1..25: mol_type = other RNA
ggactgataggagagtcattgcaaa

SEQ ID NO: 832 - RNA, 25 nt, synthetic construct
  misc_feature 1..25: note = Description of Artificial Sequence: Synthetic oligonucleotide
  source 1..25: mol_type = other RNA
ggactgataggagagtcattgcaaa

SEQ ID NO: 833 - RNA, 27 nt, synthetic construct
  modified_base 26..27: mod_base = OTHER; note = thymine
  misc_feature 1..27: note = Description of Artificial Sequence: Synthetic oligonucleotide
  source 1..27: mol_type = other RNA
ggactgataggagagtcattgcaaatt

SEQ ID NO: 834 - RNA, 25 nt, synthetic construct
  misc_feature 1..25: note = Description of Artificial Sequence: Synthetic oligonucleotide
  source 1..25: mol_type = other RNA
ggactgataggagagtcattgcaaa

SEQ ID NO: 835 - RNA, 23 nt, synthetic construct
  modified_base 22..23: mod_base = OTHER; note = thymine
  misc_feature 1..23: note = Description of Artificial Sequence: Synthetic oligonucleotide
  source 1..23: mol_type = other RNA
tgataggagagtcattgcaaatt

SEQ ID NO: 836 - RNA, 17 nt, synthetic construct
  modified_base 16..17: mod_base = OTHER; note = thymine
  misc_feature 1..17: note = Description of Artificial Sequence: Synthetic oligonucleotide
  source 1..17: mol_type = other RNA
gagagtcattgcaaatt

SEQ ID NO: 837 - RNA, 17 nt, synthetic construct
  modified_base 16..17: mod_base = OTHER; note = thymine
  misc_feature 1..17: note = Description of Artificial Sequence: Synthetic oligonucleotide
  source 1..17: mol_type = other RNA
gagagtcattgcaaatt

SEQ ID NO: 838 - RNA, 15 nt, synthetic construct
  misc_feature 1..15: note = Description of Artificial Sequence: Synthetic oligonucleotide
  source 1..15: mol_type = other RNA
gagagtcattgcaaa

SEQ ID NO: 839 - skipped

SEQ ID NO: 840 - RNA, 23 nt, synthetic construct
  modified_base 22..23: mod_base = OTHER; note = thymine
  misc_feature 1..23: note = Description of Artificial Sequence: Synthetic oligonucleotide
  source 1..23: mol_type = other RNA
accagttatactggatatctatt

SEQ ID NO: 841 - RNA, 23 nt, synthetic construct
  modified_base 22..23: mod_base = OTHER; note = thymine
  misc_feature 1..23: note = Description of Artificial Sequence: Synthetic oligonucleotide
  source 1..23: mol_type = other RNA
gggagaagtatggaaacaaaatt

SEQ ID NO: 842 - RNA, 23 nt, synthetic construct
  modified_base 22..23: mod_base = OTHER; note = thymine
  misc_feature 1..23: note = Description of Artificial Sequence: Synthetic oligonucleotide
  source 1..23: mol_type = other RNA
aagtatggaaacaaaataaattt

SEQ ID NO: 843 - RNA, 23 nt, synthetic construct
  modified_base 22..23: mod_base = OTHER; note = thymine
  misc_feature 1..23: note = Description of Artificial Sequence: Synthetic oligonucleotide
  source 1..23: mol_type = other RNA
ttcatcaactcagatacaatatt

SEQ ID NO: 844 - RNA, 23 nt, synthetic construct
  modified_base 22..23: mod_base = OTHER; note = thymine
  misc_feature 1..23: note = Description of Artificial Sequence: Synthetic oligonucleotide
  source 1..23: mol_type = other RNA
cggaggaaattgctattttgatt

SEQ ID NO: 845 - RNA, 23 nt, synthetic construct
  modified_base 22..23: mod_base = OTHER; note = thymine
  misc_feature 1..23: note = Description of Artificial Sequence: Synthetic oligonucleotide
  source 1..23: mol_type = other RNA
aggaaattgctattttgatgatt

SEQ ID NO: 846 - RNA, 23 nt, synthetic construct
  modified_base 22..23: mod_base = OTHER; note = thymine
  misc_feature 1..23: note = Description of Artificial Sequence: Synthetic oligonucleotide
  source 1..23: mol_type = other RNA
caccggaaaatattgtgaaattt

SEQ ID NO: 847 - RNA, 23 nt, synthetic construct
  modified_base 22..23: mod_base = OTHER; note = thymine
  misc_feature 1..23: note = Description of Artificial Sequence: Synthetic oligonucleotide
  source 1..23: mol_type = other RNA
ttgtgaaatggcgttttcaaatt

SEQ ID NO: 848 - RNA, 23 nt, synthetic construct
  modified_base 22..23: mod_base = OTHER; note = thymine
  misc_feature 1..23: note = Description of Artificial Sequence: Synthetic oligonucleotide
  source 1..23: mol_type = other RNA
caggattcttccactatagaatt

SEQ ID NO: 849 - RNA, 23 nt, synthetic construct
  modified_base 22..23: mod_base = OTHER; note = thymine
  misc_feature 1..23: note = Description of Artificial Sequence: Synthetic oligonucleotide
  source 1..23: mol_type = other RNA
ggcagatcttaacatggatattt

SEQ ID NO: 850 - RNA, 23 nt, synthetic construct
  modified_base 22..23: mod_base = OTHER; note = thymine
  misc_feature 1..23: note = Description of Artificial Sequence: Synthetic oligonucleotide
  source 1..23: mol_type = other RNA
ggcaatgagtgaagactttgttt

SEQ ID NO: 851 - RNA, 23 nt, synthetic construct
  modified_base 22..23: mod_base = OTHER; note = thymine
  misc_feature 1..23: note = Description of Artificial Sequence: Synthetic oligonucleotide
  source 1..23: mol_type = other RNA
atctgaaaatgtggataataatt

SEQ ID NO: 852 - RNA, 23 nt, synthetic construct
  modified_base 22..23: mod_base = OTHER; note = thymine
  misc_feature 1..23: note = Description of Artificial Sequence: Synthetic oligonucleotide
  source 1..23: mol_type = other RNA
ctgaaaatgtggataataagatt

SEQ ID NO: 853 - RNA, 23 nt, synthetic construct
  modified_base 22..23: mod_base = OTHER; note = thymine
  misc_feature 1..23: note = Description of Artificial Sequence: Synthetic oligonucleotide
  source 1..23: mol_type = other RNA
gtggataataagaattatggatt

SEQ ID NO: 854 - RNA, 23 nt, synthetic construct
  modified_base 22..23: mod_base = OTHER; note = thymine
  misc_feature 1..23: note = Description of Artificial Sequence: Synthetic oligonucleotide
  source 1..23: mol_type = other RNA
tggataataagaattatggaatt

SEQ ID NO: 855 - RNA, 23 nt, synthetic construct
  modified_base 22..23: mod_base = OTHER; note = thymine
  misc_feature 1..23: note = Description of Artificial Sequence: Synthetic oligonucleotide
  source 1..23: mol_type = other RNA
tggaatctcttcaaacgaaaatt

SEQ ID NO: 856 - RNA, 23 nt, synthetic construct
  modified_base 22..23: mod_base = OTHER; note = thymine
  misc_feature 1..23: note = Description of Artificial Sequence: Synthetic oligonucleotide
  source 1..23: mol_type = other RNA
atctcttcaaacgaaaatctatt

SEQ ID NO: 857 - RNA, 23 nt, synthetic construct
  modified_base 22..23: mod_base = OTHER; note = thymine
  misc_feature 1..23: note = Description of Artificial Sequence: Synthetic oligonucleotide
  source 1..23: mol_type = other RNA
ctcttcaaacgaaaatctaaatt

SEQ ID NO: 858 - RNA, 23 nt, synthetic construct
  modified_base 22..23: mod_base = OTHER; note = thymine
  misc_feature 1..23: note = Description of Artificial Sequence: Synthetic oligonucleotide
  source 1..23: mol_type = other RNA
ttcaaacgaaaatctaaacaatt

SEQ ID NO: 859 - RNA, 23 nt, synthetic construct
  modified_base 22..23: mod_base = OTHER; note = thymine
  misc_feature 1..23: note = Description of Artificial Sequence: Synthetic oligonucleotide
  source 1..23: mol_type = other RNA
aacgaaaatctaaacaaactatt

SEQ ID NO: 860 - RNA, 23 nt, synthetic construct
  modified_base 22..23: mod_base = OTHER; note = thymine
  misc_feature 1..23: note = Description of Artificial Sequence: Synthetic oligonucleotide
  source 1..23: mol_type = other RNA
aacaaactaccaactttgaaatt

SEQ ID NO: 861 - RNA, 23 nt, synthetic construct
  modified_base 22..23: mod_base = OTHER; note = thymine
  misc_feature 1..23: note = Description of Artificial Sequence: Synthetic oligonucleotide
  source 1..23: mol_type = other RNA
taccaactttgaaaatccaattt

SEQ ID NO: 862 - RNA, 23 nt, synthetic construct
  modified_base 22..23: mod_base = OTHER; note = thymine
  misc_feature 1..23: note = Description of Artificial Sequence: Synthetic oligonucleotide
  source 1..23: mol_type = other RNA
aactttgaaaatccaatctattt

SEQ ID NO: 863 - RNA, 23 nt, synthetic construct
  modified_base 22..23: mod_base = OTHER; note = thymine
  misc_feature 1..23: note = Description of Artificial Sequence: Synthetic oligonucleotide
  source 1..23: mol_type = other RNA
tgcaacagaagacacttttaatt

SEQ ID NO: 864 - RNA, 23 nt, synthetic construct
  modified_base 22..23: mod_base = OTHER; note = thymine
  misc_feature 1..23: note = Description of Artificial Sequence: Synthetic oligonucleotide
  source 1..23: mol_type = other RNA
caccgcaaatcttgttaaagatt

SEQ ID NO: 865 - RNA, 23 nt, synthetic construct
  modified_base 22..23: mod_base = OTHER; note = thymine
  misc_feature 1..23: note = Description of Artificial Sequence: Synthetic oligonucleotide
  source 1..23: mol_type = other RNA
cgcaaatcttgttaaagaagatt

SEQ ID NO: 866 - RNA, 23 nt, synthetic construct
  modified_base 22..23: mod_base = OTHER; note = thymine
  misc_feature 1..23: note = Description of Artificial Sequence: Synthetic oligonucleotide
  source 1..23: mol_type = other RNA
ctctgaagtatagctataccatt

SEQ ID NO: 867 - RNA, 23 nt, synthetic construct
  modified_base 22..23: mod_base = OTHER; note = thymine
  misc_feature 1..23: note = Description of Artificial Sequence: Synthetic oligonucleotide
  source 1..23: mol_type = other RNA
accagctatttagggaataattt

SEQ ID NO: 868 - RNA, 23 nt, synthetic construct
  modified_base 22..23: mod_base = OTHER; note = thymine
  misc_feature 1..23: note = Description of Artificial Sequence: Synthetic oligonucleotide
  source 1..23: mol_type = other RNA
cagctatttagggaataattatt

SEQ ID NO: 869 - RNA, 23 nt, synthetic construct
  modified_base 22..23: mod_base = OTHER; note = thymine
  misc_feature 1..23: note = Description of Artificial Sequence: Synthetic oligonucleotide
  source 1..23: mol_type = other RNA
aacacacttttgcacatatattt

SEQ ID NO: 870 - RNA, 23 nt, synthetic construct
  modified_base 22..23: mod_base = OTHER; note = thymine
  misc_feature 1..23: note = Description of Artificial Sequence: Synthetic oligonucleotide
  source 1..23: mol_type = other RNA
cacacttttgcacatatattttt

SEQ ID NO: 871 - RNA, 23 nt, synthetic construct
  modified_base 22..23: mod_base = OTHER; note = thymine
  misc_feature 1..23: note = Description of Artificial Sequence: Synthetic oligonucleotide
  source 1..23: mol_type = other RNA
tacaaacagatgaaaaaagtttt

SEQ ID NO: 872 - RNA, 23 nt, synthetic construct
  modified_base 22..23: mod_base = OTHER; note = thymine
  misc_feature 1..23: note = Description of Artificial Sequence: Synthetic oligonucleotide
  source 1..23: mol_type = other RNA
aagttaacattcagtactttatt

SEQ ID NO: 873 - RNA, 23 nt, synthetic construct
  modified_base 22..23: mod_base = OTHER; note = thymine
  misc_feature 1..23: note = Description of Artificial Sequence: Synthetic oligonucleotide
  source 1..23: mol_type = other RNA
ttcagtactttatgaaaaaaatt

SEQ ID NO: 874 - RNA, 23 nt, synthetic construct
  modified_base 22..23: mod_base = OTHER; note = thymine
  misc_feature 1..23: note = Description of Artificial Sequence: Synthetic oligonucleotide
  source 1..23: mol_type = other RNA
cagtactttatgaaaaaaatatt

SEQ ID NO: 875 - RNA, 23 nt, synthetic construct
  modified_base 22..23: mod_base = OTHER; note = thymine
  misc_feature 1..23: note = Description of Artificial Sequence: Synthetic oligonucleotide
  source 1..23: mol_type = other RNA
ccgtctcatatttttacaaattt

SEQ ID NO: 876 - RNA, 23 nt, synthetic construct
  modified_base 22..23: mod_base = OTHER; note = thymine
  misc_feature 1..23: note = Description of Artificial Sequence: Synthetic oligonucleotide
  source 1..23: mol_type = other RNA
tacaaataattatcacaatgttt

SEQ ID NO: 877 - RNA, 23 nt, synthetic construct
  modified_base 22..23: mod_base = OTHER; note = thymine
  misc_feature 1..23: note = Description of Artificial Sequence: Synthetic oligonucleotide
  source 1..23: mol_type = other RNA
atcacaatgtactatatgtattt

SEQ ID NO: 878 - RNA, 23 nt, synthetic construct
  modified_base 22..23: mod_base = OTHER; note = thymine
  misc_feature 1..23: note = Description of Artificial Sequence: Synthetic oligonucleotide
  source 1..23: mol_type = other RNA
cacaatgtactatatgtatattt

SEQ ID NO: 879 - RNA, 23 nt, synthetic construct
  modified_base 22..23: mod_base = OTHER; note = thymine
  misc_feature 1..23: note = Description of Artificial Sequence: Synthetic oligonucleotide
  source 1..23: mol_type = other RNA
atgtactatatgtatatcttttt

SEQ ID NO: 880 - RNA, 23 nt, synthetic construct
  modified_base 22..23: mod_base = OTHER; note = thymine
  misc_feature 1..23: note = Description of Artificial Sequence: Synthetic oligonucleotide
  source 1..23: mol_type = other RNA
ctgaagttgtctgaaggtaattt

SEQ ID NO: 881 - RNA, 23 nt, synthetic construct
  modified_base 22..23: mod_base = OTHER; note = thymine
  misc_feature 1..23: note = Description of Artificial Sequence: Synthetic oligonucleotide
  source 1..23: mol_type = other RNA
ctgaaggtaatactataaatatt

SEQ ID NO: 882 - RNA, 23 nt, synthetic construct
  modified_base 22..23: mod_base = OTHER; note = thymine
  misc_feature 1..23: note = Description of Artificial Sequence: Synthetic oligonucleotide
  source 1..23: mol_type = other RNA
ttgtaaattttggaaagattatt

SEQ ID NO: 883 - RNA, 23 nt, synthetic construct
  modified_base 22..23: mod_base = OTHER; note = thymine
  misc_feature 1..23: note = Description of Artificial Sequence: Synthetic oligonucleotide
  source 1..23: mol_type = other RNA
tggaaagattatcctgttacttt

SEQ ID NO: 884 - RNA, 23 nt, synthetic construct
  modified_base 22..23: mod_base = OTHER; note = thymine
  misc_feature 1..23: note = Description of Artificial Sequence: Synthetic oligonucleotide
  source 1..23: mol_type = other RNA
aagattatcctgttactgaattt

SEQ ID NO: 885 - RNA, 23 nt, synthetic construct
  modified_base 22..23: mod_base = OTHER; note = thymine
  misc_feature 1..23: note = Description of Artificial Sequence: Synthetic oligonucleotide
  source 1..23: mol_type = other RNA
atcctgttactgaatttgctatt

SEQ ID NO: 886 - RNA, 23 nt, synthetic construct
  modified_base 22..23: mod_base = OTHER; note = thymine
  misc_feature 1..23: note = Description of Artificial Sequence: Synthetic oligonucleotide
  source 1..23: mol_type = other RNA
tcctgttactgaatttgctaatt

SEQ ID NO: 887 - RNA, 23 nt, synthetic construct
  modified_base 22..23: mod_base = OTHER; note = thymine
  misc_feature 1..23: note = Description of Artificial Sequence: Synthetic oligonucleotide
  source 1..23: mol_type = other RNA
tactgaatttgctaataaagatt

SEQ ID NO: 888 - RNA, 23 nt, synthetic construct
  modified_base 22..23: mod_base = OTHER; note = thymine
  misc_feature 1..23: note = Description of Artificial Sequence: Synthetic oligonucleotide
  source 1..23: mol_type = other RNA
gtgatcattatagtaaatgattt

SEQ ID NO: 889 - RNA, 23 nt, synthetic construct
  modified_base 22..23: mod_base = OTHER; note = thymine
  misc_feature 1..23: note = Description of Artificial Sequence: Synthetic oligonucleotide
  source 1..23: mol_type = other RNA
tagtaaatgatccaacaagaatt

SEQ ID NO: 890 - RNA, 23 nt, synthetic construct
  modified_base 22..23: mod_base = OTHER; note = thymine
  misc_feature 1..23: note = Description of Artificial Sequence: Synthetic oligonucleotide
  source 1..23: mol_type = other RNA
tccaacaagaaaaggaattgatt

SEQ ID NO: 891 - RNA, 23 nt, synthetic construct
  modified_base 22..23: mod_base = OTHER; note = thymine
  misc_feature 1..23: note = Description of Artificial Sequence: Synthetic oligonucleotide
  source 1..23: mol_type = other RNA
cactcatatttcctataaaattt

SEQ ID NO: 892 - RNA, 23 nt, synthetic construct
  modified_base 22..23: mod_base = OTHER; note = thymine
  misc_feature 1..23: note = Description of Artificial Sequence: Synthetic oligonucleotide
  source 1..23: mol_type = other RNA
ctcatatttcctataaaattatt

SEQ ID NO: 893 - RNA, 23 nt, synthetic construct
  modified_base 22..23: mod_base = OTHER; note = thymine
  misc_feature 1..23: note = Description of Artificial Sequence: Synthetic oligonucleotide
  source 1..23: mol_type = other RNA
gtccatttttacacattagcatt

SEQ ID NO: 894 - RNA, 23 nt, synthetic construct
  modified_base 22..23: mod_base = OTHER; note = thymine
  misc_feature 1..23: note = Description of Artificial Sequence: Synthetic oligonucleotide
  source 1..23: mol_type = other RNA
tagcacttaattaatgttcaatt

SEQ ID NO: 895 - RNA, 23 nt, synthetic construct
  modified_base 22..23: mod_base = OTHER; note = thymine
  misc_feature 1..23: note = Description of Artificial Sequence: Synthetic oligonucleotide
  source 1..23: mol_type = other RNA
agcacttaattaatgttcaattt

SEQ ID NO: 896 - RNA, 23 nt, synthetic construct
  modified_base 22..23: mod_base = OTHER; note = thymine
  misc_feature 1..23: note = Description of Artificial Sequence: Synthetic oligonucleotide
  source 1..23: mol_type = other RNA
cacttaattaatgttcaatattt

SEQ ID NO: 897 - RNA, 23 nt, synthetic construct
  modified_base 22..23: mod_base = OTHER; note = thymine
  misc_feature 1..23: note = Description of Artificial Sequence: Synthetic oligonucleotide
  source 1..23: mol_type = other RNA
ttcaatattacatgtcaattttt

SEQ ID NO: 898 - RNA, 23 nt, synthetic construct
  modified_base 22..23: mod_base = OTHER; note = thymine
  misc_feature 1..23: note = Description of Artificial Sequence: Synthetic oligonucleotide
  source 1..23: mol_type = other RNA
ttgattaatggctatgttgattt

SEQ ID NO: 899 - RNA, 23 nt, synthetic construct
  modified_base 22..23: mod_base = OTHER; note = thymine
  misc_feature 1..23: note = Description of Artificial Sequence: Synthetic oligonucleotide
  source 1..23: mol_type = other RNA
ggccactatgtgttgtatagatt

SEQ ID NO: 900 - RNA, 23 nt, synthetic construct
  modified_base 22..23: mod_base = OTHER; note = thymine
  misc_feature 1..23: note = Description of Artificial Sequence: Synthetic oligonucleotide
  source 1..23: mol_type = other RNA
cactatgtgttgtatagacattt

SEQ ID NO: 901 - RNA, 23 nt, synthetic construct
  modified_base 22..23: mod_base = OTHER; note = thymine
  misc_feature 1..23: note = Description of Artificial Sequence: Synthetic oligonucleotide
  source 1..23: mol_type = other RNA
aggtaggaaaagcaattcagttt

SEQ ID NO: 902 - RNA, 23 nt, synthetic construct
  modified_base 22..23: mod_base = OTHER; note = thymine
  misc_feature 1..23: note = Description of Artificial Sequence: Synthetic oligonucleotide
  source 1..23: mol_type = other RNA
gccaagacaacatttttattttt

SEQ ID NO: 903 - RNA, 23 nt, synthetic construct
  modified_base 22..23: mod_base = OTHER; note = thymine
  misc_feature 1..23: note = Description of Artificial Sequence: Synthetic oligonucleotide
  source 1..23: mol_type = other RNA
gacaacatttttatttgtgattt

SEQ ID NO: 904 - RNA, 23 nt, synthetic construct
  modified_base 22..23: mod_base = OTHER; note = thymine
  misc_feature 1..23: note = Description of Artificial Sequence: Synthetic oligonucleotide
  source 1..23: mol_type = other RNA
atgaggaaatcccatatcatttt

SEQ ID NO: 905 - RNA, 23 nt, synthetic construct
  modified_base 22..23: mod_base = OTHER; note = thymine
  misc_feature 1..23: note = Description of Artificial Sequence: Synthetic oligonucleotide
  source 1..23: mol_type = other RNA
tgcattgagtttgtggttaattt

SEQ ID NO: 906 - RNA, 23 nt, synthetic construct
  modified_base 22..23: mod_base = OTHER; note = thymine
  misc_feature 1..23: note = Description of Artificial Sequence: Synthetic oligonucleotide
  source 1..23: mol_type = other RNA
ttgagtttgtggttaattaaatt

SEQ ID NO: 907 - RNA, 23 nt, synthetic construct
  modified_base 22..23: mod_base = OTHER; note = thymine
  misc_feature 1..23: note = Description of Artificial Sequence: Synthetic oligonucleotide
  source 1..23: mol_type = other RNA
agctgaatttctgaaaccaaatt

SEQ ID NO: 908 - RNA, 23 nt, synthetic construct
  modified_base 22..23: mod_base = OTHER; note = thymine
  misc_feature 1..23: note = Description of Artificial Sequence: Synthetic oligonucleotide
  source 1..23: mol_type = other RNA
accaaatctgtgtcttcataatt

SEQ ID NO: 909 - RNA, 23 nt, synthetic construct
  modified_base 22..23: mod_base = OTHER; note = thymine
  misc_feature 1..23: note = Description of Artificial Sequence: Synthetic oligonucleotide
  source 1..23: mol_type = other RNA
tgggtttttgtttctatgaaatt

SEQ ID NO: 910 - RNA, 23 nt, synthetic construct
  modified_base 22..23: mod_base = OTHER; note = thymine
  misc_feature 1..23: note = Description of Artificial Sequence: Synthetic oligonucleotide
  source 1..23: mol_type = other RNA
ttgtttctatgaaaatatcattt

SEQ ID NO: 911 - RNA, 23 nt, synthetic construct
  modified_base 22..23: mod_base = OTHER; note = thymine
  misc_feature 1..23: note = Description of Artificial Sequence: Synthetic oligonucleotide
  source 1..23: mol_type = other RNA
ttctatgaaaatatcattatatt

SEQ ID NO: 912 - RNA, 23 nt, synthetic construct
  modified_base 22..23: mod_base = OTHER; note = thymine
  misc_feature 1..23: note = Description of Artificial Sequence: Synthetic oligonucleotide
  source 1..23: mol_type = other RNA
atgaaaatatcattataatcatt

SEQ ID NO: 913 - RNA, 23 nt, synthetic construct
  modified_base 22..23: mod_base = OTHER; note = thymine
  misc_feature 1..23: note = Description of Artificial Sequence: Synthetic oligonucleotide
  source 1..23: mol_type = other RNA
atcattataatcactatttattt

SEQ ID NO: 914 - RNA, 23 nt, synthetic construct
  modified_base 22..23: mod_base = OTHER; note = thymine
  misc_feature 1..23: note = Description of Artificial Sequence: Synthetic oligonucleotide
  source 1..23: mol_type = other RNA
aaccattcttattaagctttttt

SEQ ID NO: 915 - RNA, 23 nt, synthetic construct
  modified_base 22..23: mod_base = OTHER; note = thymine
  misc_feature 1..23: note = Description of Artificial Sequence: Synthetic oligonucleotide
  source 1..23: mol_type = other RNA
accattcttattaagcttttttt

SEQ ID NO: 916 - RNA, 23 nt, synthetic construct
  modified_base 22..23: mod_base = OTHER; note = thymine
  misc_feature 1..23: note = Description of Artificial Sequence: Synthetic oligonucleotide
  source 1..23: mol_type = other RNA
gtggctaaatgtgtacatttatt

SEQ ID NO: 917 - RNA, 23 nt, synthetic construct
  modified_base 22..23: mod_base = OTHER; note = thymine
  misc_feature 1..23: note = Description of Artificial Sequence: Synthetic oligonucleotide
  source 1..23: mol_type = other RNA
tggctaaatgtgtacatttattt

SEQ ID NO: 918 - RNA, 23 nt, synthetic construct
  modified_base 22..23: mod_base = OTHER; note = thymine
  misc_feature 1..23: note = Description of Artificial Sequence: Synthetic oligonucleotide
  source 1..23: mol_type = other RNA
ggctaaatgtgtacatttatatt

SEQ ID NO: 919 - RNA, 23 nt, synthetic construct
  modified_base 22..23: mod_base = OTHER; note = thymine
  misc_feature 1..23: note = Description of Artificial Sequence: Synthetic oligonucleotide
  source 1..23: mol_type = other RNA
atgtgtacatttatattagaatt

SEQ ID NO: 920 - RNA, 23 nt, synthetic construct
  modified_base 22..23: mod_base = OTHER; note = thymine
  misc_feature 1..23: note = Description of Artificial Sequence: Synthetic oligonucleotide
  source 1..23: mol_type = other RNA
cagatcttttctttaattctttt

SEQ ID NO: 921 - RNA, 23 nt, synthetic construct
  modified_base 22..23: mod_base = OTHER; note = thymine
  misc_feature 1..23: note = Description of Artificial Sequence: Synthetic oligonucleotide
  source 1..23: mol_type = other RNA
atcttttctttaattcttatttt

SEQ ID NO: 922 - RNA, 23 nt, synthetic construct
  modified_base 22..23: mod_base = OTHER; note = thymine
  misc_feature 1..23: note = Description of Artificial Sequence: Synthetic oligonucleotide
  source 1..23: mol_type = other RNA
ttctttaattcttattggttttt

SEQ ID NO: 923 - RNA, 23 nt, synthetic construct
  modified_base 22..23: mod_base = OTHER; note = thymine
  misc_feature 1..23: note = Description of Artificial Sequence: Synthetic oligonucleotide
  source 1..23: mol_type = other RNA
ctcttaaatagtgggtatagttt

SEQ ID NO: 924 - RNA, 23 nt, synthetic construct
  modified_base 22..23: mod_base = OTHER; note = thymine
  misc_feature 1..23: note = Description of Artificial Sequence: Synthetic oligonucleotide
  source 1..23: mol_type = other RNA
gtgctaatattgcacatttgttt

SEQ ID NO: 925 - RNA, 23 nt, synthetic construct
  modified_base 22..23: mod_base = OTHER; note = thymine
  misc_feature 1..23: note = Description of Artificial Sequence: Synthetic oligonucleotide
  source 1..23: mol_type = other RNA
tgctaatattgcacatttgtttt

SEQ ID NO: 926 - RNA, 23 nt, synthetic construct
  modified_base 22..23: mod_base = OTHER; note = thymine
  misc_feature 1..23: note = Description of Artificial Sequence: Synthetic oligonucleotide
  source 1..23: mol_type = other RNA
atggatgaatgaatgaaacattt

SEQ ID NO: 927 - RNA, 23 nt, synthetic construct
  modified_base 22..23: mod_base = OTHER; note = thymine
  misc_feature 1..23: note = Description of Artificial Sequence: Synthetic oligonucleotide
  source 1..23: mol_type = other RNA
atgaatgaaacatatactacttt

SEQ ID NO: 928 - RNA, 23 nt, synthetic construct
  modified_base 22..23: mod_base = OTHER; note = thymine
  misc_feature 1..23: note = Description of Artificial Sequence: Synthetic oligonucleotide
  source 1..23: mol_type = other RNA
atgaaacatatactactgatttt

SEQ ID NO: 929 - RNA, 23 nt, synthetic construct
  modified_base 22..23: mod_base = OTHER; note = thymine
  misc_feature 1..23: note = Description of Artificial Sequence: Synthetic oligonucleotide
  source 1..23: mol_type = other RNA
aacatatactactgattattttt

SEQ ID NO: 930 - RNA, 23 nt, synthetic construct
  modified_base 22..23: mod_base = OTHER; note = thymine
  misc_feature 1..23: note = Description of Artificial Sequence: Synthetic oligonucleotide
  source 1..23: mol_type = other RNA
ctgactgtaattactttgatttt

SEQ ID NO: 931 - RNA, 23 nt, synthetic construct
  modified_base 22..23: mod_base = OTHER; note = thymine
  misc_feature 1..23: note = Description of Artificial Sequence: Synthetic oligonucleotide
  source 1..23: mol_type = other RNA
ctgtaattactttgattagattt

SEQ ID NO: 932 - RNA, 23 nt, synthetic construct
  modified_base 22..23: mod_base = OTHER; note = thymine
  misc_feature 1..23: note = Description of Artificial Sequence: Synthetic oligonucleotide
  source 1..23: mol_type = other RNA
tagataaacaactggaaataatt

SEQ ID NO: 933 - RNA, 23 nt, synthetic construct
  modified_base 22..23: mod_base = OTHER; note = thymine
  misc_feature 1..23: note = Description of Artificial Sequence: Synthetic oligonucleotide
  source 1..23: mol_type = other RNA
ctgctgaaaaagttctaataatt

SEQ ID NO: 934 - RNA, 23 nt, synthetic construct
  modified_base 22..23: mod_base = OTHER; note = thymine
  misc_feature 1..23: note = Description of Artificial Sequence: Synthetic oligonucleotide
  source 1..23: mol_type = other RNA
tgctgaaaaagttctaataaatt

SEQ ID NO: 935 - DNA, 1283 bp, Homo sapiens
  source 1..1283: mol_type = other DNA
gtgcgcgtgcgcagggataagagagcggtctggacagcgcgtggccggcgccgctgtggggacagcatgagcggcggttggatggcgcaggttggagcgtggcgaacaggggctctgggcctggcgctgctgctgctgctcggcctcggactaggcctggaggccgccgcgagcccgctttccaccccgacctctgcccaggccgcaggccccagctcaggctcgtgcccacccaccaagttccagtgccgcaccagtggcttatgcgtgcccctcacctggcgctgcgacagggacttggactgcagcgatggcagcgatgaggaggagtgcaggattgagccatgtacccagaaagggcaatgcccaccgccccctggcctcccctgcccctgcaccggcgtcagtgactgctctgggggaactgacaagaaactgcgcaactgcagccgcctggcctgcctagcaggcgagctccgttgcacgctgagcgatgactgcattccactcacgtggcgctgcgacggccacccagactgtcccgactccagcgacgagctcggctgtggaaccaatgagatcctcccggaaggggatgccacaaccatggggccccctgtgaccctggagagtgtcacctctctcaggaatgccacaaccatggggccccctgtgaccctggagagtgtcccctctgtcgggaatgccacatcctcctctgccggagaccagtctggaagcccaactgcctatggggttattgcagctgctgcggtgctcagtgcaagcctggtcaccgccaccctcctccttttgtcctggctccgagcccaggagcgcctccgcccactggggttactggtggccatgaaggagtccctgctgctgtcagaacagaagacctcgctgccctgaggacaagcacttgccaccaccgtcactcagccctgggcgtagccggacaggaggagagcagtgatgcggatgggtacccgggcacaccagccctcagagacctgagctcttctggccacgtggaacctcgaacccgagctcctgcagaagtggccctggagattgagggtccctggacactccctatggagatccggggagctaggatggggaacctgccacagccagaactgaggggctggccccaggcagctcccagggggtagaacggccctgtgcttaagacactcctgctgccccgtctgagggtggcgattaaagttgcttcacatcctcaaaaaaaaaaaaaaaaaaaaaaaaaaaaaaaa

SEQ ID NO: 936 - protein, 282 aa, Homo sapiens
MSGGWMAQVGAWRTGALGLALLLLLGLGLGLEAAASPLSTPTSAQAAGPSSGSCPPTKFQCRTSGLCVPLTWRCDRDLDCSDGSDEEECRIEPCTQKGQCPPPPGLPCPCTGVSDCSGGTDKKLRNCSRLACLAGELRCTLSDDCIPLTWRCDGHPDCPDSSDELGCGTNEILPEGDATTMGPPVTLESVTSLRNATTMGPPVTLESVPSVGNATSSSAGDQSGSPTAYGVIAAAAVLSASLVTATLLLLSWLRAQERLRPLGLLVAMKESLLLSEQKTSLP

SEQ ID NO: 937 - DNA, 1127 bp, Homo sapiens
  source 1..1127: mol_type = other DNA
gcgtgcgcgtgcgcagggataagagagcggtctggacagcgcgtggccggcgccgctgtggggacagcatgagcggcggttggatggcgcaggttggagcgtggcgaacaggggctctgggcctggcgctgctgctgctgctcggcctcggactaggcctggaggccgccgcgagcccgctttccaccccgacctctgcccaggccgcagggattgagccatgtacccagaaagggcaatgcccaccgccccctggcctcccctgcccctgcaccggcgtcagtgactgctctgggggaactgacaagaaactgcgcaactgcagccgcctggcctgcctagcaggcgagctccgttgcacgctgagcgatgactgcattccactcacgtggcgctgcgacggccacccagactgtcccgactccagcgacgagctcggctgtggaaccaatgagatcctcccggaaggggatgccacaaccatggggccccctgtgaccctggagagtgtcacctctctcaggaatgccacaaccatggggccccctgtgaccctggagagtgtcccctctgtcgggaatgccacatcctcctctgccggagaccagtctggaagcccaactgcctatggggttattgcagctgctgcggtgctcagtgcaagcctggtcaccgccaccctcctccttttgtcctggctccgagcccaggagcgcctccgcccactggggttactggtggccatgaaggagtccctgctgctgtcagaacagaagacctcgctgccctgaggacaagcacttgccaccaccgtcactcagccctgggcgtagccggacaggaggagagcagtgatgcggatgggtacccgggcacaccagccctcagagacctgagctcttctggccacgtggaacctcgaacccgagctcctgcagaagtggccctggagattgagggtccctggacactccctatggagatccggggagctaggatggggaacctgccacagccagaactgaggggctggccccaggcagctcccagggggtagaacggccctgtgcttaagacactcctgctgccccgtctgagggtggcaattaaagttgcttcacatcctc

SEQ ID NO: 938 - protein, 240 aa, Homo sapiens
MSGGWMAQVGAWRTGALGLALLLLLGLGLGLEAAASPLSTPTSAQAAGIEPCTQKGQCPPPPGLPCPCTGVSDCSGGTDKKLRNCSRLACLAGELRCTLSDDCIPLTWRCDGHPDCPDSSDELGCGTNEILPEGDATTMGPPVTLESVTSLRNATTMGPPVTLESVPSVGNATSSSAGDQSGSPTAYGVIAAAAVLSASLVTATLLLLSWLRAQERLRPLGLLVAMKESLLLSEQKTSLP

SEQ ID NO: 939 - DNA, 15735 bp, Homo sapiens
  source 1..15735: mol_type = other DNA
ggtctaaagggctttatgcactgtctggagggtggggactggcgcgggtagaaaacgggatgcctcgggcgtgggggcaggcttttggccactaggagctggcggaggtgcagacctaaaggagcgttcgctagcagaggcgctgccggtgcggtgtgctacgcgcgcccacctcccggggaaggaacggcgaggccggggaccgtcgcggagatggatcgcgggccggcagcagtggcgtgcacgctgctcctggctctcgtcgcctgcctagcgccggccagtggccaagaatgtgacagtgcgcattttcgctgtggaagtgggcattgcatccctgcagactggaggtgtgatgggaccaaagactgttcagatgacgcggatgaaattggctgcgctgttgtgacctgccagcagggctatttcaagtgccagagtgagggacaatgcatccccaactcctgggtgtgtgaccaagatcaagactgtgatgatggctcagatgaacgtcaagattgctcacaaagtacatgctcaagtcatcagataacatgctccaatggtcagtgtatcccaagtgaatacaggtgcgaccacgtcagagactgccccgatggagctgatgagaatgactgccagtacccaacatgtgagcagcttacttgtgacaatggggcctgctataacaccagtcagaagtgtgattggaaagttgattgcagggactcctcagatgaaatcaactgcactgagatatgcttgcacaatgagttttcatgtggcaatggagagtgtatccctcgtgcttatgtctgtgaccatgacaatgattgccaagacggcagtgacgaacatgcttgcaactatccgacctgcggtggttaccagttcacttgccccagtggccgatgcatttatcaaaactgggtttgtgatggagaagatgactgtaaagataatggagatgaagatggatgtgaaagcggtcctcatgatgttcataaatgttccccaagagaatggtcttgcccagagtcgggacgatgcatctccatttataaagtttgtgatgggattttagattgcccaggaagagaagatgaaaacaacactagtaccggaaaatactgtagtatgactctgtgctctgccttgaactgccagtaccagtgccatgagacgccgtatggaggagcgtgtttttgtcccccaggttatatcatcaaccacaatgacagccgtacctgtgttgagtttgatgattgccagatatggggaatttgtgaccagaagtgtgaaagccgacctggccgtcacctgtgccactgtgaagaagggtatatcttggagcgtggacagtattgcaaagctaatgattcctttggcgaggcctccattatcttctccaatggtcgggatttgttaattggtgatattcatggaaggagcttccggatcctagtggagtctcagaatcgtggagtggccgtgggtgtggctttccactatcacctgcaaagagttttttggacagacaccgtgcaaaataaggttttttcagttgacattaatggtttaaatatccaagaggttctcaatgtttctgttgaaaccccagagaacctggctgtggactgggttaataataaaatctatctagtggaaaccaaggtcaaccgcatagatatggtaaatttggatggaagctatcgggttacccttataactgaaaacttggggcatcctagaggaattgccgtggacccaactgttggttatttatttttctcagattgggagagcctttctggggaacctaagctggaaagggcattcatggatggcagcaaccgtaaagacttggtgaaaacaaagctgggatggcctgctggggtaactctggatatgatatcgaagcgtgtttactgggttgactctcggtttgattacattgaaactgtaacttatgatggaattcaaaggaagactgtagttcatggaggctccctcattcctcatccctttggagtaagcttatttgaaggtcaggtgttctttacagattggacaaagatggccgtgctgaaggcaaacaagttcacagagaccaacccacaagtgtactaccaggcttccctgaggccctatggagtgactgtttaccattccctcagacagccctatgctaccaatccgtgtaaagataacaatgggggctgtgagcaggtctgtgtcctcagccacagaacagataatgatggtttgggtttccgttgcaagtgcacattcggcttccaactggatacagatgagcgccactgcattgctgttcagaatttcctcattttttcatcccaagttgctattcgtgggatcccgttcaccttgtctacccaggaagatgtcatggttccagtttcggggaatccttctttctttgtcgggattgattttgacgcccaggacagcactatctttttttcagatatgtcaaaacacatgatttttaagcaaaagattgatggcacaggaagagaaattctcgcagctaacagggtggaaaatgttgaaagtttggcttttgattggatttcaaagaatctctattggacagactctcattacaagagtatcagtgtcatgaggctagctgataaaacgagacgcacagtagttcagtatttaaataacccacggtcggtggtagttcatccttttgccgggtatctattcttcactgattggttccgtcctgctaaaattatgagagcatggagtgacggatctcacctcttgcctgtaataaacactactcttggatggcccaatggcttggccatcgattgggctgcttcacgattgtactgggtagatgcctattttgataaaattgagcacagcacctttgatggtttagacagaagaagactgggccatatagagcagatgacacatccgtttggacttgccatctttggagagcatttattttttactgactggagactgggtgccattattcgagtcaggaaagcagatggtggagaaatgacagttatccgaagtggcattgcttacatactgcatttgaaatcgtatgatgtcaacatccagactggttctaacgcctgtaatcaacccacgcatcctaacggtgactgcagccacttctgcttcccggtgccaaatttccagcgagtgtgtgggtgcccttatggaatgaggctggcttccaatcacttgacatgcgagggggacccaaccaatgaaccacccacagagcagtgtggcttattttccttcccctgtaaaaatggcagatgtgtgcccaattactatctctgtgatggagtcgatgattgtcatgataacagtgatgagcaactatgtggcacacttaataatacctgttcatcttcggcgttcacctgtggccatggggagtgcattcctgcacactggcgctgtgacaaacgcaacgactgtgtggatggcagtgatgagcacaactgccccacccacgcacctgcttcctgccttgacacccaatacacctgtgataatcaccagtgtatctcaaagaactgggtctgtgacacagacaatgattgtggggatggatctgatgaaaagaactgcaattcgacagagacatgccaacctagtcagtttaattgccccaatcatcgatgtattgacctatcgtttgtctgtgatggtgacaaggattgtgttgatggatctgatgaggttggttgtgtattaaactgtactgcttctcaattcaagtgtgccagtggggataaatgtattggcgtcacaaatcgttgtgatggtgtttttgattgcagtgacaactcggatgaagcaggctgtccaaccaggcctcctggtatgtgccactcagatgaatttcagtgccaagaagatggtatctgcatcccgaacttctgggaatgtgatgggcatccagactgcctctatggatctgatgagcacaatgcctgtgtccccaagacttgcccttcatcatatttccactgtgacaacggaaactgcatccacagggcatggctctgtgatcgggacaatgactgcggggatatgagtgatgagaaggactgccctactcagccctttcgctgtcctagttggcaatggcagtgtcttggccataacatctgtgtgaatctgagtgtagtgtgtgatggcatctttgactgccccaatgggacagatgagtccccactttgcaatgggaacagctgctcagatttcaatggtggttgtactcacgagtgtgttcaagagccctttggggctaaatgcctatgtccattgggattcttacttgccaatgattctaagacctgtgaagacatagatgaatgtgatattctaggctcttgtagccagcactgttacaatatgagaggttctttccggtgctcgtgtgatacaggctacatgttagaaagtgatgggaggacttgcaaagttacagcatctgagagtctgctgttacttgtggcaagtcagaacaaaattattgccgacagtgtcacctcccaggtccacaatatctattcattggtcgagaatggttcttacattgtagctgttgattttgattcaattagtggtcgtatcttttggtctgatgcaactcagggtaaaacctggagtgcgtttcaaaatggaacggacagaagagtggtatttgacagtagcatcatcttgactgaaactattgcaatagattgggtaggtcgtaatctttactggacagactatgctctggaaacaattgaagtctccaaaattgatgggagccacaggactgtgctgattagtaaaaacctaacaaatccaagaggactagcattagatcccagaatgaatgagcatctactgttctggtctgactggggccaccaccctcgcatcgagcgagccagcatggacggcagcatgcgcactgtcattgtccaggacaagatcttctggccctgcggcttaactattgactaccccaacagactgctctacttcatggactcctatcttgattacatggacttttgtgattataatggacaccatcggagacaggtgatagccagtgatttgattatacggcacccctatgccctaactctctttgaagactctgtgtactggactgaccgtgctactcgtcgggttatgcgagccaacaagtggcatggagggaaccagtcagttgtaatgtataatattcaatggccccttgggattgttgcggttcatccttcgaaacaaccaaattccgtgaatccatgtgccttttcccgctgcagccatctctgcctgctttcctcacaggggcctcatttttactcctgtgtttgtccttcaggatggagtctgtctcctgatctcctgaattgcttgagagatgatcaacctttcttaataactgtaaggcaacatataatttttggaatctcccttaatcctgaggtgaagagcaatgatgctatggtccccatagcagggatacagaatggtttagatgttgaatttgatgatgctgagcaatacatctattgggttgaaaatccaggtgaaattcacagagtgaagacagatggcaccaacaggacagtatttgcttctatatctatggtggggccttctatgaacctggccttagattggatttcaagaaacctttattctaccaatcctagaactcagtcaatcgaggttttgacactccacggagatatcagatacagaaaaacattgattgccaatgatgggacagctcttggagttggctttccaattggcataactgttgatcctgctcgtgggaagctgtactggtcagaccaaggaactgacagtggggttcctgccaagatcgccagtgctaacatggatggcacatctgtgaaaactctctttactgggaacctcgaacacctggagtgtgtcactcttgacatcgaagagcagaaactctactgggcagtcactggaagaggagtgattgaaagaggaaacgtggatggaacagatcgaatgatcctggtacaccagctttcccacccctggggaattgcagtccatgattctttcctttattatactgatgaacagtatgaggtcattgaaagagttgataaggccactggggccaacaaaatagtcttgagagataatgttccaaatctgaggggtcttcaagtttatcacagacgcaatgccgccgaatcctcaaatggctgtagcaacaacatgaatgcctgtcagcagatttgcctgcctgtaccaggaggattgttttcctgcgcctgtgccactggatttaaactcaatcctgataatcggtcctgctctccatataactctttcattgttgtttcaatgctgtctgcaatcagaggctttagcttggaattgtcagatcattcagaaaccatggtgccggtggcaggccaaggacgaaacgcactgcatgtggatgtggatgtgtcctctggctttatttattggtgtgattttagcagctcagtggcatctgataatgcgatccgtagaattaaaccagatggatcttctctgatgaacattgtgacacatggaataggagaaaatggagtccggggtattgcagtggattgggtagcaggaaatctttatttcaccaatgcctttgtttctgaaacactgatagaagttctgcggatcaatactacttaccgccgtgttcttcttaaagtcacagtggacatgcctaggcatattgttgtagatcccaagaacagatacctcttctgggctgactatgggcagagaccaaagattgagcgttctttccttgactgtaccaatcgaacagtgcttgtgtcagagggcattgtcacaccacggggcttggcagtggaccgaagtgatggctacgtttattgggttgatgattctttagatataattgcaaggattcgtatcaatggagagaactctgaagtgattcgttatggcagtcgttacccaactccttatggcatcactgtttttgaaaattctatcatatgggtagataggaatttgaaaaagatcttccaagccagcaaggaaccagagaacacagagccacccacagtgataagagacaatatcaactggctaagagatgtgaccatctttgacaagcaagtccagccccggtcaccagcagaggtcaacaacaacccttgcttggaaaacaatggtgggtgctctcatctctgctttgctctgcctggattgcacaccccaaaatgtgactgtgcctttgggaccctgcaaagtgatggcaagaattgtgccatttcaacagaaaatttcctcatctttgccttgtctaattccttgagaagcttacacttggaccctgaaaaccatagcccacctttccaaacaataaatgtggaaagaactgtcatgtctctagactatgacagtgtaagtgatagaatctacttcacacaaaatttagcctctggagttggacagatttcctatgccaccctgtcttcagggatccatactccaactgtcattgcttcaggtatagggactgctgatggcattgcctttgactggattactagaagaatttattacagtgactacctcaaccagatgattaattccatggctgaagatgggtctaaccgcactgtgatagcccgcgttccaaaaccaagagcaattgtgttagatccctgccaagggtacctgtactgggctgactgggatacacatgccaaaatcgagagagccacattgggaggaaacttccgcgtacccattgtgaacagcagtctggtcatgcccagtgggctgactctggactatgaagaggaccttctctactgggtggatgctagtctgcagaggattgaacgcagcactctgacgggcgtggatcgtgaagtcattgtcaatgcagccgttcatgcttttggcttgactctctatggccagtatatttactggactgacttgtacacacaaagaatttaccgagctaacaaatatgacgggtcaggtcagattgcaatgaccacaaatttgctctcccagcccaggggaatcaacactgttgtgaagaaccagaaacaacagtgtaacaatccttgtgaacagtttaatgggggctgcagccatatctgtgcaccaggtccaaatggtgccgagtgccagtgtccacatgagggcaactggtatttggccaacaacaggaagcactgcattgtggacaatggtgaacgatgtggtgcatcttccttcacctgctccaatgggcgctgcatctcggaagagtggaagtgtgataatgacaacgactgtggggatggcagtgatgagatggaaagtgtctgtgcacttcacacctgctcaccgacagccttcacctgtgccaatgggcgatgtgtccaatactcttaccgctgtgattactacaatgactgtggtgatggcagtgatgaggcagggtgcctgttcagggactgcaatgccaccacggagtttatgtgcaataacagaaggtgcatacctcgtgagtttatctgcaatggtgtagacaactgccatgataataacacttcagatgagaaaaattgccctgatcgcacttgccagtctggatacacaaaatgtcataattcaaatatttgtattcctcgcgtttatttgtgtgacggagacaatgactgtggagataacagtgatgaaaaccctacttattgcaccactcacacgtgcagcagcagtgagttccaatgcgcatctgggcgctgtattcctcaacattggtattgtgatcaagaaacagattgttttgatgcctctgatgaacctgcctcttgtggtcactctgagcgaacatgcctagctgatgagttcaagtgtgatggtgggaggtgcatcccaagcgaatggatctgtgacggtgataatgactgtggggatatgagtgacgaggataaaaggcaccagtgtcagaatcaaaactgctcggattccgagtttctctgtgtaaatgacagacctccggacaggaggtgcattccccagtcttgggtctgtgatggcgatgtggattgtactgacggctacgatgagaatcagaattgcaccaggagaacttgctctgaaaatgaattcacctgtggttacggactgtgtatcccaaagatattcaggtgtgaccggcacaatgactgtggtgactatagcgacgagaggggctgcttataccagacttgccaacagaatcagtttacctgtcagaacgggcgctgcattagtaaaaccttcgtctgtgatgaggataatgactgtggagacggatctgatgagctgatgcacctgtgccacaccccagaacccacgtgtccacctcacgagttcaagtgtgacaatgggcgctgcatcgagatgatgaaactctgcaaccacctagatgactgtttggacaacagcgatgagaaaggctgtggcattaatgaatgccatgacccttcaatcagtggctgcgatcacaactgcacagacaccttaaccagtttctattgttcctgtcgtcctggttacaagctcatgtctgacaagcggacttgtgttgatattgatgaatgcacagagatgccttttgtctgtagccagaagtgtgagaatgtaataggctcctacatctgtaagtgtgccccaggctacctccgagaaccagatggaaagacctgccggcaaaacagtaacatcgaaccctatctcatttttagcaaccgttactatttgagaaatttaactatagatggctatttttactccctcatcttggaaggactggacaatgttgtggcattagattttgaccgagtagagaagagattgtattggattgatacacagaggcaagtcattgagagaatgtttctgaataagacaaacaaggagacaatcataaaccacagactaccagctgcagaaagtctggctgtagactgggtttccagaaagctctactggttggatgcccgcctggatggcctctttgtctctgacctcaatggtggacaccgccgcatgctggcccagcactgtgtggatgccaacaacaccttctgctttgataatcccagaggacttgcccttcaccctcaatatgggtacctctactgggcagactggggtcaccgcgcatacattgggagagtaggcatggatggaaccaacaagtctgtgataatctccaccaagttagagtggcctaatggcatcaccattgattacaccaatgatctactctactgggcagatgcccacctgggttacatagagtactctgatttggagggccaccatcgacacacggtgtatgatggggcactgcctcaccctttcgctattaccatttttgaagacactatttattggacagattggaatacaaggacagtggaaaagggaaacaaatatgatggatcaaatagacagacactggtgaacacaacacacagaccatttgacatccatgtgtaccatccatataggcagcccattgtgagcaatccctgtggtaccaacaatggtggctgttctcatctctgcctcatcaagccaggaggaaaagggttcacttgcgagtgtccagatgacttccgcacccttcagctgagtggcagcacctactgcatgcccatgtgctccagcacccagttcctgtgcgctaacaatgaaaagtgcattcctatctggtggaaatgtgatggacagaaagactgctcagatggctctgatgaactggccctttgcccgcagcgcttctgccgactgggacagttccagtgcagtgacggcaactgcaccagcccgcagactttatgcaatgctcaccaaaattgccctgatgggtctgatgaagaccgtcttctttgtgagaatcaccactgtgactccaatgaatggcagtgcgccaacaaacgttgcatcccagaatcctggcagtgtgacacatttaacgactgtgaggataactcagatgaagacagttcccactgtgccagcaggacctgccggccgggccagtttcggtgtgctaatggccgctgcatcccgcaggcctggaagtgtgatgtggataatgattgtggagaccactcggatgagcccattgaagaatgcatgagctctgcccatctctgtgacaacttcacagaattcagctgcaaaacaaattaccgctgcatcccaaagtgggccgtgtgcaatggtgtagatgactgcagggacaacagtgatgagcaaggctgtgaggagaggacatgccatcctgtgggggatttccgctgtaaaaatcaccactgcatccctcttcgttggcagtgtgatgggcaaaatgactgtggagataactcagatgaggaaaactgtgctccccgggagtgcacagagagcgagtttcgatgtgtcaatcagcagtgcattccctcgcgatggatctgtgaccattacaacgactgtggggacaactcagatgaacgggactgtgagatgaggacctgccatcctgaatattttcagtgtacaagtggacattgtgtacacagtgaactgaaatgcgatggatccgctgactgtttggatgcgtctgatgaagctgattgtcccacacgctttcctgatggtgcatactgccaggctactatgttcgaatgcaaaaaccatgtttgtatcccgccatattggaaatgtgatggcgatgatgactgtggcgatggttcagatgaagaacttcacctgtgcttggatgttccctgtaattcaccaaaccgtttccggtgtgacaacaatcgctgcatttatagtcatgaggtgtgcaatggtgtggatgactgtggagatggaactgatgagacagaggagcactgtagaaaaccgacccctaaaccttgtacagaatatgaatataagtgtggcaatgggcattgcattccacatgacaatgtgtgtgatgatgccgatgactgtggtgactggtccgatgaactgggttgcaataaaggaaaagaaagaacatgtgctgaaaatatatgcgagcaaaattgtacccaattaaatgaaggaggatttatctgctcctgtacagctgggttcgaaaccaatgtttttgacagaacctcctgtctagatatcaatgaatgtgaacaatttgggacttgtccccagcactgcagaaataccaaaggaagttatgagtgtgtctgtgctgatggcttcacgtctatgagtgaccgccctggaaaacgatgtgcagctgagggtagctctcctttgttgctactgcctgacaatgtccgaattcgaaaatataatctctcatctgagaggttctcagagtatcttcaagatgaggaatatatccaagctgttgattatgattgggatcccaaggacataggcctcagtgttgtgtattacactgtgcgaggggagggctctaggtttggtgctatcaaacgtgcctacatccccaactttgaatccggccgcaataatcttgtgcaggaagttgacctgaaactgaaatacgtaatgcagccagatggaatagcagtggactgggttggaaggcatatttactggtcagatgtcaagaataaacgcattgaggtggctaaacttgatggaaggtacagaaagtggctgatttccactgacctggaccaaccagctgctattgctgtgaatcccaaactagggcttatgttctggactgactggggaaaggaacctaaaatcgagtctgcctggatgaatggagaggaccgcaacatcctggttttcgaggaccttggttggccaactggcctttctatcgattatttgaacaatgaccgaatctactggagtgacttcaaggaggacgttattgaaaccataaaatatgatgggactgataggagagtcattgcaaaggaagcaatgaacccttacagcctggacatctttgaagaccagttatactggatatctaaggaaaagggagaagtatggaaacaaaataaatttgggcaaggaaagaaagagaaaacgctggtagtgaacccttggctcactcaagttcgaatctttcatcaactcagatacaataagtcagtgcccaacctttgcaaacagatctgcagccacctctgccttctgagacctggaggatacagctgtgcctgtccccaaggctccagctttatagaggggagcaccactgagtgtgatgcagccatcgaactgcctatcaacctgccccccccatgcaggtgcatgcacggaggaaattgctattttgatgagactgacctccccaaatgcaagtgtcctagcggctacaccggaaaatattgtgaaatggcgttttcaaaaggcatctctccaggaacaaccgcagtagctgtgctgttgacaatcctcttgatcgtcgtaattggagctctggcaattgcaggattcttccactatagaaggaccggctcccttttgcctgctctgcccaagctgccaagcttaagcagtctcgtcaagccctctgaaaatgggaatggggtgaccttcagatcaggggcagatcttaacatggatattggagtgtctggttttggacctgagactgctattgacaggtcaatggcaatgagtgaagactttgtcatggaaatggggaagcagcccataatatttgaaaacccaatgtactcagccagagacagtgctgtcaaagtggttcagccaatccaggtgactgtatctgaaaatgtggataataagaattatggaagtcccataaacccttctgagatagttccagagacaaacccaacttcaccagctgctgatggaactcaggtgacaaaatggaatctcttcaaacgaaaatctaaacaaactaccaactttgaaaatccaatctatgcacagatggagaacgagcaaaaggaaagtgttgctgcgacaccacctccatcaccttcgctccctgctaagcctaagcctccttcgagaagagacccaactccaacctattctgcaacagaagacacttttaaagacaccgcaaatcttgttaaagaagactctgaagtatagctataccagctatttagggaataattagaaacacacttttgcacatatattttttacaaacagatgaaaaaagttaacattcagtactttatgaaaaaaatatatttttccctgtttgcctatagttggaggtatcctgtgtgtctttttttacttatgccgtctcatatttttacaaataattatcacaatgtactatatgtatatctttgcactgaagttgtctgaaggtaatactataaatatattgtatatttgtaaattttggaaagattatcctgttactgaatttgctaataaagatgtctgctgatttggttggtgatcattatagtaaatgatccaacaagaaaaggaattgactggggacctttagccgtgtctaaagaagaggcaccactcatatttcctataaaattatctaggaaaggaatccaggccccgctcttgggtccatttttacacattagcacttaattaatgttcaatattacatgtcaatttgattaatggctatgttgataggggccactatgtgttgtatagacatctggacttgactgtagactcctcagataatacagaaggtaggaaaagcaattcagtttggcccttctgtgtgttggcattgtctaaccagaactctctgtttcatgtgtgttctctcactagctgccaagacaacatttttatttgtgatgtctatgaggaaatcccatatcattaagtgccagtgtcctgcattgagtttgtggttaattaaatgagctcttctgctgatggaccctggagcaatttctcccctcacctgacattcaaggtggtcacctgccctagtagttggagctcagtagctgaatttctgaaaccaaatctgtgtcttcataaaataaggtgcaaaaaaaaaaaataccagttaagtaaagcctcaactgggtttttgtttctatgaaaatatcattataatcactatttatttcctaagttgaacctgaatagaaagggaaaccattcttattaagctttttattaggccctgtggctaaatgtgtacatttatattagaatgtactgtacagtccagatcttttctttaattcttattggttttttttttttttttttttttagagatggagtcttgctatattgccaaggctgatcttgaagtcctgggctcaagtgatcctcccacctcagcctcctgagtggttggggttacgggcgtgagccactgtgcctggcttccagctctcctcttaaatagtgggtatagtctgcacaacaggaaccatggcaggaatatacactttcccatagcaaatagcatacctgactctctgtgctaatattgcacatttgttaaacaatgaatgaatggatggatggatggatggatgaatgaatgaaacatatactactgattattttattccagagttctcaaaatatttgttgctgatattttgagtgctgactgtaattactttgattagataaacaactggaaataatgctgctgaaaaagttctaataaatgtgtattttatcaga

SEQ ID NO: 940 - protein, 4655 aa, Homo sapiens
MDRGPAAVACTLLLALVACLAPASGQECDSAHFRCGSGHCIPADWRCDGTKDCSDDADEIGCAVVTCQQGYFKCQSEGQCIPNSWVCDQDQDCDDGSDERQDCSQSTCSSHQITCSNGQCIPSEYRCDHVRDCPDGADENDCQYPTCEQLTCDNGACYNTSQKCDWKVDCRDSSDEINCTEICLHNEFSCGNGECIPRAYVCDHDNDCQDGSDEHACNYPTCGGYQFTCPSGRCIYQNWVCDGEDDCKDNGDEDGCESGPHDVHKCSPREWSCPESGRCISIYKVCDGILDCPGREDENNTSTGKYCSMTLCSALNCQYQCHETPYGGACFCPPGYIINHNDSRTCVEFDDCQIWGICDQKCESRPGRHLCHCEEGYILERGQYCKANDSFGEASIIFSNGRDLLIGDIHGRSFRILVESQNRGVAVGVAFHYHLQRVFWTDTVQNKVFSVDINGLNIQEVLNVSVETPENLAVDWVNNKIYLVETKVNRIDMVNLDGSYRVTLITENLGHPRGIAVDPTVGYLFFSDWESLSGEPKLERAFMDGSNRKDLVKTKLGWPAGVTLDMISKRVYWVDSRFDYIETVTYDGIQRKTVVHGGSLIPHPFGVSLFEGQVFFTDWTKMAVLKANKFTETNPQVYYQASLRPYGVTVYHSLRQPYATNPCKDNNGGCEQVCVLSHRTDNDGLGFRCKCTFGFQLDTDERHCIAVQNFLIFSSQVAIRGIPFTLSTQEDVMVPVSGNPSFFVGIDFDAQDSTIFFSDMSKHMIFKQKIDGTGREILAANRVENVESLAFDWISKNLYWTDSHYKSISVMRLADKTRRTVVQYLNNPRSVVVHPFAGYLFFTDWFRPAKIMRAWSDGSHLLPVINTTLGWPNGLAIDWAASRLYWVDAYFDKIEHSTFDGLDRRRLGHIEQMTHPFGLAIFGEHLFFTDWRLGAIIRVRKADGGEMTVIRSGIAYILHLKSYDVNIQTGSNACNQPTHPNGDCSHFCFPVPNFQRVCGCPYGMRLASNHLTCEGDPTNEPPTEQCGLFSFPCKNGRCVPNYYLCDGVDDCHDNSDEQLCGTLNNTCSSSAFTCGHGECIPAHWRCDKRNDCVDGSDEHNCPTHAPASCLDTQYTCDNHQCISKNWVCDTDNDCGDGSDEKNCNSTETCQPSQFNCPNHRCIDLSFVCDGDKDCVDGSDEVGCVLNCTASQFKCASGDKCIGVTNRCDGVFDCSDNSDEAGCPTRPPGMCHSDEFQCQEDGICIPNFWECDGHPDCLYGSDEHNACVPKTCPSSYFHCDNGNCIHRAWLCDRDNDCGDMSDEKDCPTQPFRCPSWQWQCLGHNICVNLSVVCDGIFDCPNGTDESPLCNGNSCSDFNGGCTHECVQEPFGAKCLCPLGFLLANDSKTCEDIDECDILGSCSQHCYNMRGSFRCSCDTGYMLESDGRTCKVTASESLLLLVASQNKIIADSVTSQVHNIYSLVENGSYIVAVDFDSISGRIFWSDATQGKTWSAFQNGTDRRVVFDSSIILTETIAIDWVGRNLYWTDYALETIEVSKIDGSHRTVLISKNLTNPRGLALDPRMNEHLLFWSDWGHHPRIERASMDGSMRTVIVQDKIFWPCGLTIDYPNRLLYFMDSYLDYMDFCDYNGHHRRQVIASDLIIRHPYALTLFEDSVYWTDRATRRVMRANKWHGGNQSVVMYNIQWPLGIVAVHPSKQPNSVNPCAFSRCSHLCLLSSQGPHFYSCVCPSGWSLSPDLLNCLRDDQPFLITVRQHIIFGISLNPEVKSNDAMVPIAGIQNGLDVEFDDAEQYIYWVENPGEIHRVKTDGTNRTVFASISMVGPSMNLALDWISRNLYSTNPRTQSIEVLTLHGDIRYRKTLIANDGTALGVGFPIGITVDPARGKLYWSDQGTDSGVPAKIASANMDGTSVKTLFTGNLEHLECVTLDIEEQKLYWAVTGRGVIERGNVDGTDRMILVHQLSHPWGIAVHDSFLYYTDEQYEVIERVDKATGANKIVLRDNVPNLRGLQVYHRRNAAESSNGCSNNMNACQQICLPVPGGLFSCACATGFKLNPDNRSCSPYNSFIVVSMLSAIRGFSLELSDHSETMVPVAGQGRNALHVDVDVSSGFIYWCDFSSSVASDNAIRRIKPDGSSLMNIVTHGIGENGVRGIAVDWVAGNLYFTNAFVSETLIEVLRINTTYRRVLLKVTVDMPRHIVVDPKNRYLFWADYGQRPKIERSFLDCTNRTVLVSEGIVTPRGLAVDRSDGYVYWVDDSLDIIARIRINGENSEVIRYGSRYPTPYGITVFENSIIWVDRNLKKIFQASKEPENTEPPTVIRDNINWLRDVTIFDKQVQPRSPAEVNNNPCLENNGGCSHLCFALPGLHTPKCDCAFGTLQSDGKNCAISTENFLIFALSNSLRSLHLDPENHSPPFQTINVERTVMSLDYDSVSDRIYFTQNLASGVGQISYATLSSGIHTPTVIASGIGTADGIAFDWITRRIYYSDYLNQMINSMAEDGSNRTVIARVPKPRAIVLDPCQGYLYWADWDTHAKIERATLGGNFRVPIVNSSLVMPSGLTLDYEEDLLYWVDASLQRIERSTLTGVDREVIVNAAVHAFGLTLYGQYIYWTDLYTQRIYRANKYDGSGQIAMTTNLLSQPRGINTVVKNQKQQCNNPCEQFNGGCSHICAPGPNGAECQCPHEGNWYLANNRKHCIVDNGERCGASSFTCSNGRCISEEWKCDNDNDCGDGSDEMESVCALHTCSPTAFTCANGRCVQYSYRCDYYNDCGDGSDEAGCLFRDCNATTEFMCNNRRCIPREFICNGVDNCHDNNTSDEKNCPDRTCQSGYTKCHNSNICIPRVYLCDGDNDCGDNSDENPTYCTTHTCSSSEFQCASGRCIPQHWYCDQETDCFDASDEPASCGHSERTCLADEFKCDGGRCIPSEWICDGDNDCGDMSDEDKRHQCQNQNCSDSEFLCVNDRPPDRRCIPQSWVCDGDVDCTDGYDENQNCTRRTCSENEFTCGYGLCIPKIFRCDRHNDCGDYSDERGCLYQTCQQNQFTCQNGRCISKTFVCDEDNDCGDGSDELMHLCHTPEPTCPPHEFKCDNGRCIEMMKLCNHLDDCLDNSDEKGCGINECHDPSISGCDHNCTDTLTSFYCSCRPGYKLMSDKRTCVDIDECTEMPFVCSQKCENVIGSYICKCAPGYLREPDGKTCRQNSNIEPYLIFSNRYYLRNLTIDGYFYSLILEGLDNVVALDFDRVEKRLYWIDTQRQVIERMFLNKTNKETIINHRLPAAESLAVDWVSRKLYWLDARLDGLFVSDLNGGHRRMLAQHCVDANNTFCFDNPRGLALHPQYGYLYWADWGHRAYIGRVGMDGTNKSVIISTKLEWPNGITIDYTNDLLYWADAHLGYIEYSDLEGHHRHTVYDGALPHPFAITIFEDTIYWTDWNTRTVEKGNKYDGSNRQTLVNTTHRPFDIHVYHPYRQPIVSNPCGTNNGGCSHLCLIKPGGKGFTCECPDDFRTLQLSGSTYCMPMCSSTQFLCANNEKCIPIWWKCDGQKDCSDGSDELALCPQRFCRLGQFQCSDGNCTSPQTLCNAHQNCPDGSDEDRLLCENHHCDSNEWQCANKRCIPESWQCDTFNDCEDNSDEDSSHCASRTCRPGQFRCANGRCIPQAWKCDVDNDCGDHSDEPIEECMSSAHLCDNFTEFSCKTNYRCIPKWAVCNGVDDCRDNSDEQGCEERTCHPVGDFRCKNHHCIPLRWQCDGQNDCGDNSDEENCAPRECTESEFRCVNQQCIPSRWICDHYNDCGDNSDERDCEMRTCHPEYFQCTSGHCVHSELKCDGSADCLDASDEADCPTRFPDGAYCQATMFECKNHVCIPPYWKCDGDDDCGDGSDEELHLCLDVPCNSPNRFRCDNNRCIYSHEVCNGVDDCGDGTDETEEHCRKPTPKPCTEYEYKCGNGHCIPHDNVCDDADDCGDWSDELGCNKGKERTCAENICEQNCTQLNEGGFICSCTAGFETNVFDRTSCLDINECEQFGTCPQHCRNTKGSYECVCADGFTSMSDRPGKRCAAEGSSPLLLLPDNVRIRKYNLSSERFSEYLQDEEYIQAVDYDWDPKDIGLSVVYYTVRGEGSRFGAIKRAYIPNFESGRNNLVQEVDLKLKYVMQPDGIAVDWVGRHIYWSDVKNKRIEVAKLDGRYRKWLISTDLDQPAAIAVNPKLGLMFWTDWGKEPKIESAWMNGEDRNILVFEDLGWPTGLSIDYLNNDRIYWSDFKEDVIETIKYDGTDRRVIAKEAMNPYSLDIFEDQLYWISKEKGEVWKQNKFGQGKKEKTLVVNPWLTQVRIFHQLRYNKSVPNLCKQICSHLCLLRPGGYSCACPQGSSFIEGSTTECDAAIELPINLPPPCRCMHGGNCYFDETDLPKCKCPSGYTGKYCEMAFSKGISPGTTAVAVLLTILLIVVIGALAIAGFFHYRRTGSLLPALPKLPSLSSLVKPSENGNGVTFRSGADLNMDIGVSGFGPETAIDRSMAMSEDFVMEMGKQPIIFENPMYSARDSAVKVVQPIQVTVSENVDNKNYGSPINPSEIVPETNPTSPAADGTQVTKWNLFKRKSKQTTNFENPIYAQMENEQKESVAATPPPSPSLPAKPKPPSRRDPTPTYSATEDTFKDTANLVKEDSEV

SEQ ID NO: 941 - DNA, 21 bp, synthetic construct
  misc_feature 1..21: note = Description of Artificial Sequence: Synthetic oligonucleotide
  source 1..21: mol_type = other DNA
cctaaggttaagtcgccctcg

SEQ ID NO: 942 - DNA, 21 bp, synthetic construct
  misc_feature 1..21: note = Description of Artificial Sequence: Synthetic oligonucleotide
  source 1..21: mol_type = other DNA
cgagggcgacttaaccttagg

SEQ ID NO: 943 - DNA, 21 bp, synthetic construct
  misc_feature 1..21: note = Description of Artificial Sequence: Synthetic oligonucleotide
  source 1..21: mol_type = other DNA
ccctcagagacctgagctctt

SEQ ID NO: 944 - DNA, 21 bp, synthetic construct
  misc_feature 1..21: note = Description of Artificial Sequence: Synthetic oligonucleotide
  source 1..21: mol_type = other DNA
aagagctcaggtctctgaggg

SEQ ID NO: 945 - DNA, 21 bp, synthetic construct
  misc_feature 1..21: note = Description of Artificial Sequence: Synthetic oligonucleotide
  source 1..21: mol_type = other DNA
cctgtaataaacactactctt

SEQ ID NO: 946 - DNA, 21 bp, synthetic construct
  misc_feature 1..21: note = Description of Artificial Sequence: Synthetic oligonucleotide
  source 1..21: mol_type = other DNA
aagagtagtgtttattacagg

SEQ ID NO: 947 - RNA, 21 nt, synthetic construct
  misc_feature 1..21: note = Description of Artificial Sequence: Synthetic oligonucleotide
  source 1..21: mol_type = other RNA
cctaaggttaagtcgccctcg

SEQ ID NO: 948 - RNA, 19 nt, synthetic construct
  misc_feature 1..19: note = Description of Artificial Sequence: Synthetic oligonucleotide
  source 1..19: mol_type = other RNA
tggtttacatgttgtgtga

SEQ ID NO: 949 - RNA, 25 nt, synthetic construct
  misc_feature 1..25: note = Description of Artificial Sequence: Synthetic oligonucleotide
  source 1..25: mol_type = other RNA
gggctctaggtttggtgctatcaaa

SEQ ID NO: 950 - RNA, 25 nt, synthetic construct
  misc_feature 1..25: note = Description of Artificial Sequence: Synthetic oligonucleotide
  source 1..25: mol_type = other RNA
ggactgataggagagtcattgcaaa

SEQ ID NO: 951 - RNA, 21 nt, synthetic construct
  misc_feature 1..21: note = Description of Artificial Sequence: Synthetic oligonucleotide
  source 1..21: mol_type = other RNA
cctgtaataaacactactctt

SEQ ID NO: 952 - RNA, 21 nt, synthetic construct
  misc_feature 1..21: note = Description of Artificial Sequence: Synthetic oligonucleotide
  source 1..21: mol_type = other RNA
ccttctatgaacctggcctta

SEQ ID NO: 953 - RNA, 19 nt, synthetic construct
  misc_feature 1..19: note = Description of Artificial Sequence: Synthetic oligonucleotide
  source 1..19: mol_type = other RNA
gtgatttgattatacggca

SEQ ID NO: 954 - RNA, 19 nt, synthetic construct
  misc_feature 1..19: note = Description of Artificial Sequence: Synthetic oligonucleotide
  source 1..19: mol_type = other RNA
cctcaaatggctgtagcaa

SEQ ID NO: 955 - RNA, 25 nt, synthetic construct
  misc_feature 1..25: note = Description of Artificial Sequence: Synthetic oligonucleotide
  source 1..25: mol_type = other RNA
gaactgacaagaaactgcgcaactg

SEQ ID NO: 956 - RNA, 21 nt, synthetic construct
  misc_feature 1..21: note = Description of Artificial Sequence: Synthetic oligonucleotide
  source 1..21: mol_type = other RNA
ccctcagagacctgagctctt

SEQ ID NO: 957 - RNA, 27 nt, synthetic construct
  modified_base 26..27: mod_base = OTHER; note = thymine
  misc_feature 1..27: note = Description of Artificial Sequence: Synthetic oligonucleotide
  source 1..27: mol_type = other RNA
cagttgcgcagtttcttgtcagttctt

SEQ ID NO: 958 - RNA, 27 nt, synthetic construct
  modified_base 26..27: mod_base = OTHER; note = thymine
  misc_feature 1..27: note = Description of Artificial Sequence: Synthetic oligonucleotide
  source 1..27: mol_type = other RNA
cagttgcgcagtttcttgtcagttctt

SEQ ID NO: 959 - RNA, 27 nt, synthetic construct
  modified_base 26..27: mod_base = OTHER; note = thymine
  misc_feature 1..27: note = Description of Artificial Sequence: Synthetic oligonucleotide
  source 1..27: mol_type = other RNA
cagttgcgcagtttcttgtcagttctt

SEQ ID NO: 960 - RNA, 27 nt, synthetic construct
  modified_base 26..27: mod_base = OTHER; note = thymine
  misc_feature 1..27: note = Description of Artificial Sequence: Synthetic oligonucleotide
  source 1..27: mol_type = other RNA
cagttgcgcagtttcttgtcagttctt

SEQ ID NO: 961 - RNA, 23 nt, synthetic construct
  modified_base 22..23: mod_base = OTHER; note = thymine
  misc_feature 1..23: note = Description of Artificial Sequence: Synthetic oligonucleotide
  source 1..23: mol_type = other RNA
aagagctcaggtctctgagggtt

SEQ ID NO: 962 - RNA, 23 nt, synthetic construct
  modified_base 22..23: mod_base = OTHER; note = thymine
  misc_feature 1..23: note = Description of Artificial Sequence: Synthetic oligonucleotide
  source 1..23: mol_type = other RNA
aagagctcaggtctctgagggtt

SEQ ID NO: 963 - RNA, 23 nt, synthetic construct
  modified_base 22..23: mod_base = OTHER; note = thymine
  misc_feature 1..23: note = Description of Artificial Sequence: Synthetic oligonucleotide
  source 1..23: mol_type = other RNA
aagagctcaggtctctgagggtt

SEQ ID NO: 964 - RNA, 27 nt, synthetic construct
  modified_base 26..27: mod_base = OTHER; note = thymine
  misc_feature 1..27: note = Description of Artificial Sequence: Synthetic oligonucleotide
  source 1..27: mol_type = other RNA
tttgatagcaccaaacctagagccctt

SEQ ID NO: 965 - RNA, 27 nt, synthetic construct
  modified_base 26..27: mod_base = OTHER; note = thymine
  misc_feature 1..27: note = Description of Artificial Sequence: Synthetic oligonucleotide
  source 1..27: mol_type = other RNA
tttgatagcaccaaacctagagccctt

SEQ ID NO: 966 - RNA, 27 nt, synthetic construct
  modified_base 26..27: mod_base = OTHER; note = thymine
  misc_feature 1..27: note = Description of Artificial Sequence: Synthetic oligonucleotide
  source 1..27: mol_type = other RNA
tttgatagcaccaaacctagagccctt

SEQ ID NO: 967 - RNA, 27 nt, synthetic construct
  modified_base 26..27: mod_base = OTHER; note = thymine
  misc_feature 1..27: note = Description of Artificial Sequence: Synthetic oligonucleotide
  source 1..27: mol_type = other RNA
tttgatagcaccaaacctagagccctt

SEQ ID NO: 968 - RNA, 27 nt, synthetic construct
  modified_base 26..27: mod_base = OTHER; note = thymine
  misc_feature 1..27: note = Description of Artificial Sequence: Synthetic oligonucleotide
  source 1..27: mol_type = other RNA
tttgatagcaccaaacctagagccctt

SEQ ID NO: 969 - RNA, 27 nt, synthetic construct
  modified_base 26..27: mod_base = OTHER; note = thymine
  misc_feature 1..27: note = Description of Artificial Sequence: Synthetic oligonucleotide
  source 1..27: mol_type = other RNA
tttgcaatgactctcctatcagtcctt

SEQ ID NO: 970 - RNA, 27 nt, synthetic construct
  modified_base 26..27: mod_base = OTHER; note = thymine
  misc_feature 1..27: note = Description of Artificial Sequence: Synthetic oligonucleotide
  source 1..27: mol_type = other RNA
tttgcaatgactctcctatcagtcctt

SEQ ID NO: 971 - RNA, 27 nt, synthetic construct
  modified_base 26..27: mod_base = OTHER; note = thymine
  misc_feature 1..27: note = Description of Artificial Sequence: Synthetic oligonucleotide
  source 1..27: mol_type = other RNA
tttgcaatgactctcctatcagtcctt

SEQ ID NO: 972 - RNA, 27 nt, synthetic construct
  modified_base 26..27: mod_base = OTHER; note = thymine
  misc_feature 1..27: note = Description of Artificial Sequence: Synthetic oligonucleotide
  source 1..27: mol_type = other RNA
tttgcaatgactctcctatcagtcctt

SEQ ID NO: 973 - RNA, 27 nt, synthetic construct
  modified_base 1..2: mod_base = OTHER; note = thymine
  misc_feature 1..27: note = Description of Artificial Sequence: Synthetic oligonucleotide
  source 1..27: mol_type = other RNA
ttgtcaacgcgtcaaagaacagtcaag

SEQ ID NO: 974 - RNA, 27 nt, synthetic construct
  modified_base 1..2: mod_base = OTHER; note = thymine
  misc_feature 1..27: note = Description of Artificial Sequence: Synthetic oligonucleotide
  source 1..27: mol_type = other RNA
ttgtcaacgcgtcaaagaacagtcaag

SEQ ID NO: 975 - RNA, 27 nt, synthetic construct
  modified_base 1..2: mod_base = OTHER; note = thymine
  misc_feature 1..27: note = Description of Artificial Sequence: Synthetic oligonucleotide
  source 1..27: mol_type = other RNA
ttgtcaacgcgtcaaagaacagtcaag

SEQ ID NO: 976 - RNA, 27 nt, synthetic construct
  modified_base 1..2: mod_base = OTHER; note = thymine
  misc_feature 1..27: note = Description of Artificial Sequence: Synthetic oligonucleotide
  source 1..27: mol_type = other RNA
ttgtcaacgcgtcaaagaacagtcaag

SEQ ID NO: 977 - RNA, 27 nt, synthetic construct
  modified_base 1..2: mod_base = OTHER; note = thymine
  misc_feature 1..27: note = Description of Artificial Sequence: Synthetic oligonucleotide
  source 1..27: mol_type = other RNA
ttgtcaacgcgtcaaagaacagtcaag

SEQ ID NO: 978 - RNA, 27 nt, synthetic construct
  modified_base 1..2: mod_base = OTHER; note = thymine
  misc_feature 1..27: note = Description of Artificial Sequence: Synthetic oligonucleotide
  source 1..27: mol_type = other RNA
ttgtcaacgcgtcaaagaacagtcaag

SEQ ID NO: 979 - RNA, 23 nt, synthetic construct
  modified_base 1..2: mod_base = OTHER; note = thymine
  misc_feature 1..23: note = Description of Artificial Sequence: Synthetic oligonucleotide
  source 1..23: mol_type = other RNA
ttttctcgagtccagagactccc

SEQ ID NO: 980 - RNA, 23 nt, synthetic construct
  modified_base 1..2: mod_base = OTHER; note = thymine
  misc_feature 1..23: note = Description of Artificial Sequence: Synthetic oligonucleotide
  source 1..23: mol_type = other RNA
ttttctcgagtccagagactccc

SEQ ID NO: 981 - RNA, 23 nt, synthetic construct
  modified_base 1..2: mod_base = OTHER; note = thymine
  misc_feature 1..23: note = Description of Artificial Sequence: Synthetic oligonucleotide
  source 1..23: mol_type = other RNA
ttttctcgagtccagagactccc

SEQ ID NO: 982 - RNA, 23 nt, synthetic construct
  modified_base 1..2: mod_base = OTHER; note = thymine
  misc_feature 1..23: note = Description of Artificial Sequence: Synthetic oligonucleotide
  source 1..23: mol_type = other RNA
ttttctcgagtccagagactccc

SEQ ID NO: 983 - RNA, 23 nt, synthetic construct
  modified_base 1..2: mod_base = OTHER; note = thymine
  misc_feature 1..23: note = Description of Artificial Sequence: Synthetic oligonucleotide
  source 1..23: mol_type = other RNA
ttttctcgagtccagagactccc

SEQ ID NO: 984 - RNA, 27 nt, synthetic construct
  modified_base 1..2: mod_base = OTHER; note = thymine
  misc_feature 1..27: note = Description of Artificial Sequence: Synthetic oligonucleotide
  source 1..27: mol_type = other RNA
ttaaactatcgtggtttggatctcggg

SEQ ID NO: 985 - RNA, 27 nt, synthetic construct
  modified_base 1..2: mod_base = OTHER; note = thymine
  misc_feature 1..27: note = Description of Artificial Sequence: Synthetic oligonucleotide
  source 1..27: mol_type = other RNA
ttaaactatcgtggtttggatctcggg

SEQ ID NO: 986 - RNA, 27 nt, synthetic construct
  modified_base 1..2: mod_base = OTHER; note = thymine
  misc_feature 1..27: note = Description of Artificial Sequence: Synthetic oligonucleotide
  source 1..27: mol_type = other RNA
ttaaactatcgtggtttggatctcggg

SEQ ID NO: 987 - RNA, 27 nt, synthetic construct
  modified_base 1..2: mod_base = OTHER; note = thymine
  misc_feature 1..27: note = Description of Artificial Sequence: Synthetic oligonucleotide
  source 1..27: mol_type = other RNA
ttaaactatcgtggtttggatctcggg

SEQ ID NO: 988 - RNA, 27 nt, synthetic construct
  modified_base 1..2: mod_base = OTHER; note = thymine
  misc_feature 1..27: note = Description of Artificial Sequence: Synthetic oligonucleotide
  source 1..27: mol_type = other RNA
ttaaactgtcgtggtttggatctcggg

SEQ ID NO: 989 - RNA, 27 nt, synthetic construct
  modified_base 1..2: mod_base = OTHER; note = thymine
  misc_feature 1..27: note = Description of Artificial Sequence: Synthetic oligonucleotide
  source 1..27: mol_type = other RNA
ttaaactgtcgtggtttggatctcggg

SEQ ID NO: 990 - RNA, 27 nt, synthetic construct
  modified_base 1..2: mod_base = OTHER; note = thymine
  misc_feature 1..27: note = Description of Artificial Sequence: Synthetic oligonucleotide
  source 1..27: mol_type = other RNA
ttaaactatcgtggtttggatctcggg

SEQ ID NO: 991 - RNA, 27 nt, synthetic construct
  modified_base 1..2: mod_base = OTHER; note = thymine
  misc_feature 1..27: note = Description of Artificial Sequence: Synthetic oligonucleotide
  source 1..27: mol_type = other RNA
ttaaacgttactgagaggatagtcagg

SEQ ID NO: 992 - RNA, 27 nt, synthetic construct
  modified_base 1..2: mod_base = OTHER; note = thymine
  misc_feature 1..27: note = Description of Artificial Sequence: Synthetic oligonucleotide
  source 1..27: mol_type = other RNA
ttaaacgttactgagaggatagtcagg

SEQ ID NO: 993 - RNA, 27 nt, synthetic construct
  modified_base 1..2: mod_base = OTHER; note = thymine
  misc_feature 1..27: note = Description of Artificial Sequence: Synthetic oligonucleotide
  source 1..27: mol_type = other RNA
ttaaacgttactgagaggatagtcagg

SEQ ID NO: 994 - RNA, 27 nt, synthetic construct
  modified_base 1..2: mod_base = OTHER; note = thymine
  misc_feature 1..27: note = Description of Artificial Sequence: Synthetic oligonucleotide
  source 1..27: mol_type = other RNA
ttaaacgttactgagaggatagtcagg

SEQ ID NO: 995 - RNA, 27 nt, synthetic construct
  modified_base 1..2: mod_base = OTHER; note = thymine
  misc_feature 1..27: note = Description of Artificial Sequence: Synthetic oligonucleotide
  source 1..27: mol_type = other RNA
ttaaacgttactgagaggatagtcagg

SEQ ID NO: 996 - DNA, 23 bp, Homo sapiens
  source 1..23: mol_type = other DNA
tgcgcgtgcgcagggataagaga

SEQ ID NO: 997 - DNA, 23 bp, Homo sapiens
  source 1..23: mol_type = other DNA
cgcgtgcgcagggataagagagc

SEQ ID NO: 998 - DNA, 23 bp, Homo sapiens
  source 1..23: mol_type = other DNA
gcgccgctgtggggacagcatga

SEQ ID NO: 999 - DNA, 23 bp, Homo sapiens
  source 1..23: mol_type = other DNA
cagcatgagcggcggttggatgg

SEQ ID NO: 1000 - DNA, 23 bp, Homo sapiens
  source 1..23: mol_type = other DNA
ccgccgcgagcccgctttccacc

SEQ ID NO: 1001 - DNA, 23 bp, Homo sapiens
  source 1..23: mol_type = other DNA
ctcgtgcccacccaccaagttcc

SEQ ID NO: 1002 - DNA, 23 bp, Homo sapiens
  source 1..23: mol_type = other DNA
gtgcccacccaccaagttccagt

SEQ ID NO: 1003 - DNA, 23 bp, Homo sapiens
  source 1..23: mol_type = other DNA
gcccacccaccaagttccagtgc

SEQ ID NO: 1004 - DNA, 23 bp, Homo sapiens
  source 1..23: mol_type = other DNA
cagtgccgcaccagtggcttatg

SEQ ID NO: 1005 - DNA, 23 bp, Homo sapiens
  source 1..23: mol_type = other DNA
ccgcaccagtggcttatgcgtgc

SEQ ID NO: 1006 - DNA, 23 bp, Homo sapiens
  source 1..23: mol_type = other DNA
gcgctgcgacagggacttggact

SEQ ID NO: 1007 - DNA, 23 bp, Homo sapiens
  source 1..23: mol_type = other DNA
cagcgatggcagcgatgaggagg

SEQ ID NO: 1008 - DNA, 23 bp, Homo sapiens
  source 1..23: mol_type = other DNA
cccctgcaccggcgtcagtgact

SEQ ID NO: 1009 - DNA, 23 bp, Homo sapiens
  source 1..23: mol_type = other DNA
ctgctctgggggaactgacaaga

SEQ ID NO: 1010 - DNA, 23 bp, Homo sapiens
  source 1..23: mol_type = other DNA
ctctgggggaactgacaagaaac

SEQ ID NO: 1011 - DNA, 23 bp, Homo sapiens
  source 1..23: mol_type = other DNA
tgggggaactgacaagaaactgc

SEQ ID NO: 1012 - DNA, 25 bp, Homo sapiens
  source 1..25: mol_type = other DNA
gaactgacaagaaactgcgcaactg

SEQ ID NO: 1013 - DNA, 23 bp, Homo sapiens
  source 1..23: mol_type = other DNA
cacgctgagcgatgactgcattc

SEQ ID NO: 1014 - DNA, 23 bp, Homo sapiens
  source 1..23: mol_type = other DNA
acgctgagcgatgactgcattcc

SEQ ID NO: 1015 - DNA, 23 bp, Homo sapiens
  source 1..23: mol_type = other DNA
ctgagcgatgactgcattccact

SEQ ID NO: 1016 - DNA, 23 bp, Homo sapiens
  source 1..23: mol_type = other DNA
gagcgatgactgcattccactca

SEQ ID NO: 1017 - DNA, 23 bp, Homo sapiens
  source 1..23: mol_type = other DNA
tgcgacggccacccagactgtcc

SEQ ID NO: 1018 - DNA, 23 bp, Homo sapiens
  source 1..23: mol_type = other DNA
gagctcggctgtggaaccaatga

SEQ ID NO: 1019 - DNA, 23 bp, Homo sapiens
  source 1..23: mol_type = other DNA
tcggctgtggaaccaatgagatc

SEQ ID NO: 1020 - DNA, 23 bp, Homo sapiens
  source 1..23: mol_type = other DNA
cggctgtggaaccaatgagatcc

SEQ ID NO: 1021 - DNA, 23 bp, Homo sapiens
  source 1..23: mol_type = other DNA
ctgtggaaccaatgagatcctcc

SEQ ID NO: 1022 - DNA, 23 bp, Homo sapiens
  source 1..23: mol_type = other DNA
tggagagtgtcacctctctcagg

SEQ ID NO: 1023 - DNA, 23 bp, Homo sapiens
  source 1..23: mol_type = other DNA
ctctcaggaatgccacaaccatg

SEQ ID NO: 1024 - DNA, 23 bp, Homo sapiens
  source 1..23: mol_type = other DNA
tcccctctgtcgggaatgccaca

SEQ ID NO: 1025 - DNA, 23 bp, Homo sapiens
  source 1..23: mol_type = other DNA
ctgtcgggaatgccacatcctcc

SEQ ID NO: 1026 - DNA, 23 bp, Homo sapiens
  source 1..23: mol_type = other DNA
ctgccggagaccagtctggaagc

SEQ ID NO: 1027 - DNA, 23 bp, Homo sapiens
  source 1..23: mol_type = other DNA
cccaactgcctatggggttattg

SEQ ID NO: 1028 - DNA, 23 bp, Homo sapiens
  source 1..23: mol_type = other DNA
ctgctgcggtgctcagtgcaagc

SEQ ID NO: 1029 - DNA, 23 bp, Homo sapiens
  source 1..23: mol_type = other DNA
caccgccaccctcctccttttgt

SEQ ID NO: 1030 - DNA, 23 bp, Homo sapiens
  source 1..23: mol_type = other DNA
ccgccaccctcctccttttgtcc

SEQ ID NO: 1031 - DNA, 23 bp, Homo sapiens
  source 1..23: mol_type = other DNA
ccgcccactggggttactggtgg

SEQ ID NO: 1032 - DNA, 23 bp, Homo sapiens
  source 1..23: mol_type = other DNA
ggggttactggtggccatgaagg

SEQ ID NO: 1033 - DNA, 23 bp, Homo sapiens
  source 1..23: mol_type = other DNA
tactggtggccatgaaggagtcc

SEQ ID NO: 1034 - DNA, 23 bp, Homo sapiens
  source 1..23: mol_type = other DNA
gagtccctgctgctgtcagaaca

SEQ ID NO: 1035 - DNA, 23 bp, Homo sapiens
  source 1..23: mol_type = other DNA
ccctgctgctgtcagaacagaag

SEQ ID NO: 1036 - DNA, 23 bp, Homo sapiens
  source 1..23: mol_type = other DNA
tgctgctgtcagaacagaagacc

SEQ ID NO: 1037 - DNA, 23 bp, Homo sapiens
  source 1..23: mol_type = other DNA
tgctgtcagaacagaagacctcg

SEQ ID NO: 1038 - DNA, 23 bp, Homo sapiens
  source 1..23: mol_type = other DNA
acctcgctgccctgaggacaagc

SEQ ID NO: 1039 - DNA, 23 bp, Homo sapiens
  source 1..23: mol_type = other DNA
ctgccctgaggacaagcacttgc

SEQ ID NO: 1040 - DNA, 23 bp, Homo sapiens
  source 1..23: mol_type = other DNA
gagcagtgatgcggatgggtacc

SEQ ID NO: 1041 - DNA, 23 bp, Homo sapiens
  source 1..23: mol_type = other DNA
gggcacaccagccctcagagacc

SEQ ID NO: 1042 - DNA, 23 bp, Homo sapiens
  source 1..23: mol_type = other DNA
ccctcagagacctgagctcttct

SEQ ID NO: 1043 - DNA, 23 bp, Homo sapiens
  source 1..23: mol_type = other DNA
ctcagagacctgagctcttctgg

SEQ ID NO: 1044 - DNA, 23 bp, Homo sapiens
  source 1..23: mol_type = other DNA
gggtccctggacactccctatgg

SEQ ID NO: 1045 - DNA, 23 bp, Homo sapiens
  source 1..23: mol_type = other DNA
tccctggacactccctatggaga

SEQ ID NO: 1046 - DNA, 23 bp, Homo sapiens
  source 1..23: mol_type = other DNA
ctggacactccctatggagatcc

SEQ ID NO: 1047 - DNA, 23 bp, Homo sapiens
  source 1..23: mol_type = other DNA
acctgccacagccagaactgagg

SEQ ID NO: 1048 - DNA, 23 bp, Homo sapiens
  source 1..23: mol_type = other DNA
ggcagctcccagggggtagaacg

SEQ ID NO: 1049 - DNA, 23 bp, Homo sapiens
  source 1..23: mol_type = other DNA
gggtagaacggccctgtgcttaa

SEQ ID NO: 1050 - DNA, 23 bp, Homo sapiens
  source 1..23: mol_type = other DNA
aacggccctgtgcttaagacact

SEQ ID NO: 1051 - DNA, 23 bp, Homo sapiens
  source 1..23: mol_type = other DNA
cggccctgtgcttaagacactcc

SEQ ID NO: 1052 - DNA, 23 bp, Homo sapiens
  source 1..23: mol_type = other DNA
ttgcttcacatcctcaaaaaaaa

SEQ ID NO: 1053 - DNA, 23 bp, Homo sapiens
  source 1..23: mol_type = other DNA
tgcttcacatcctcaaaaaaaaa

SEQ ID NO: 1054 - DNA, 23 bp, Homo sapiens
  source 1..23: mol_type = other DNA
gtcaagattgctcacaaagtaca

SEQ ID NO: 1055 - DNA, 23 bp, Homo sapiens
  source 1..23: mol_type = other DNA
gtcagtgtatcccaagtgaatac

SEQ ID NO: 1056 - DNA, 23 bp, Homo sapiens
  source 1..23: mol_type = other DNA
ttgcacaatgagttttcatgtgg

SEQ ID NO: 1057 - DNA, 23 bp, Homo sapiens
  source 1..23: mol_type = other DNA
tggagaagatgactgtaaagata

SEQ ID NO: 1058 - DNA, 23 bp, Homo sapiens
  source 1..23: mol_type = other DNA
gagaagatgactgtaaagataat

SEQ ID NO: 1059 - DNA, 23 bp, Homo sapiens
  source 1..23: mol_type = other DNA
ctcatgatgttcataaatgttcc

SEQ ID NO: 1060 - DNA, 23 bp, Homo sapiens
  source 1..23: mol_type = other DNA
ctccatttataaagtttgtgatg

SEQ ID NO: 1061 - DNA, 23 bp, Homo sapiens
  source 1..23: mol_type = other DNA
tccatttataaagtttgtgatgg

SEQ ID NO: 1062 - DNA, 23 bp, Homo sapiens
  source 1..23: mol_type = other DNA
taccggaaaatactgtagtatga

SEQ ID NO: 1063 - DNA, 23 bp, Homo sapiens
  source 1..23: mol_type = other DNA
ccggaaaatactgtagtatgact

SEQ ID NO: 1064 - DNA, 23 bp, Homo sapiens
  source 1..23: mol_type = other DNA
tgccagatatggggaatttgtga

SEQ ID NO: 1065 - DNA, 23 bp, Homo sapiens
  source 1..23: mol_type = other DNA
ctgtgaagaagggtatatcttgg

SEQ ID NO: 1066 - DNA, 23 bp, Homo sapiens
  source 1..23: mol_type = other DNA
tggacagtattgcaaagctaatg

SEQ ID NO: 1067 - DNA, 23 bp, Homo sapiens
  source 1..23: mol_type = other DNA
cagtattgcaaagctaatgattc

SEQ ID NO: 1068 - DNA, 23 bp, Homo sapiens
  source 1..23: mol_type = other DNA
tgcaaagctaatgattcctttgg

SEQ ID NO: 1069 - DNA, 23 bp, Homo sapiens
  source 1..23: mol_type = other DNA
ttgttaattggtgatattcatgg

SEQ ID NO: 1070 - DNA, 23 bp, Homo sapiens
  source 1..23: mol_type = other DNA
ccgtgcaaaataaggttttttca

SEQ ID NO: 1071 - DNA, 23 bp, Homo sapiens
  source 1..23: mol_type = other DNA
gtgcaaaataaggttttttcagt

SEQ ID NO: 1072 - DNA, 23 bp, Homo sapiens
  source 1..23: mol_type = other DNA
aaggttttttcagttgacattaa

SEQ ID NO: 1073 - DNA, 23 bp, Homo sapiens
  source 1..23: mol_type = other DNA
aggttttttcagttgacattaat

SEQ ID NO: 1074 - DNA, 23 bp, Homo sapiens
  source 1..23: mol_type = other DNA
cagttgacattaatggtttaaat

SEQ ID NO: 1075 - DNA, 23 bp, Homo sapiens
  source 1..23: mol_type = other DNA
ttgacattaatggtttaaatatc

SEQ ID NO: 1076 - DNA, 23 bp, Homo sapiens
  source 1..23: mol_type = other DNA
ctgggttaataataaaatctatc

SEQ ID NO: 1077 - DNA, 23 bp, Homo sapiens
  source 1..23: mol_type = other DNA
tgggttaataataaaatctatct

SEQ ID NO: 1078 - DNA, 23 bp, Homo sapiens
  source 1..23: mol_type = other DNA
ccgcatagatatggtaaatttgg

SEQ ID NO: 1079 - DNA, 23 bp, Homo sapiens
  source 1..23: mol_type = other DNA
tacccttataactgaaaacttgg

SEQ ID NO: 1080 - DNA, 23 bp, Homo sapiens
  source 1..23: mol_type = other DNA
cccaactgttggttatttatttt

SEQ ID NO: 1081 - DNA, 23 bp, Homo sapiens
  source 1..23: mol_type = other DNA
ctgttggttatttatttttctca

SEQ ID NO: 1082 - DNA, 23 bp, Homo sapiens
  source 1..23: mol_type = other DNA
gggtaactctggatatgatatcg

SEQ ID NO: 1083 - DNA, 23 bp, Homo sapiens
  source 1..23: mol_type = other DNA
cggtttgattacattgaaactgt

SEQ ID NO: 1084 - DNA, 23 bp, Homo sapiens
  source 1..23: mol_type = other DNA
ttgattacattgaaactgtaact

SEQ ID NO: 1085 - DNA, 23 bp, Homo sapiens
  source 1..23: mol_type = other DNA
tacattgaaactgtaacttatga

SEQ ID NO: 1086 - DNA, 23 bp, Homo sapiens
  source 1..23: mol_type = other DNA
tgctaccaatccgtgtaaagata

SEQ ID NO: 1087 - DNA, 23 bp, Homo sapiens
  source 1..23: mol_type = other DNA
ttctttgtcgggattgattttga

SEQ ID NO: 1088 - DNA, 23 bp, Homo sapiens
  source 1..23: mol_type = other DNA
cagcactatctttttttcagata

SEQ ID NO: 1089 - DNA, 23 bp, Homo sapiens
  source 1..23: mol_type = other DNA
agcactatctttttttcagatat

SEQ ID NO: 1090 - DNA, 23 bp, Homo sapiens
  source 1..23: mol_type = other DNA
atgtcaaaacacatgatttttaa

SEQ ID NO: 1091 - DNA, 23 bp, Homo sapiens
  source 1..23: mol_type = other DNA
aacacatgatttttaagcaaaag

SEQ ID NO: 1092 - DNA, 23 bp, Homo sapiens
  source 1..23: mol_type = other DNA
gggtggaaaatgttgaaagtttg

SEQ ID NO: 1093 - DNA, 23 bp, Homo sapiens
  source 1..23: mol_type = other DNA
tggcttttgattggatttcaaag

SEQ ID NO: 1094 - DNA, 23 bp, Homo sapiens
  source 1..23: mol_type = other DNA
ggcttttgattggatttcaaaga

SEQ ID NO: 1095 - DNA, 23 bp, Homo sapiens
  source 1..23: mol_type = other DNA
ttggatttcaaagaatctctatt

SEQ ID NO: 1096 - DNA, 23 bp, Homo sapiens
  source 1..23: mol_type = other DNA
tggatttcaaagaatctctattg

SEQ ID NO: 1097 - DNA, 23 bp, Homo sapiens
  source 1..23: mol_type = other DNA
cacagtagttcagtatttaaata

SEQ ID NO: 1098 - DNA, 23 bp, Homo sapiens
  source 1..23: mol_type = other DNA
cagtagttcagtatttaaataac

SEQ ID NO: 1099 - DNA, 23 bp, Homo sapiens
  source 1..23: mol_type = other DNA
atccttttgccgggtatctattc

SEQ ID NO: 1100 - DNA, 23 bp, Homo sapiens
  source 1..23: mol_type = other DNA
tgggtagatgcctattttgataa

SEQ ID NO: 1101 - DNA, 23 bp, Homo sapiens
  source 1..23: mol_type = other DNA
tgcctattttgataaaattgagc

SEQ ID NO: 1102 - DNA, 23 bp, Homo sapiens
  source 1..23: mol_type = other DNA
gccatctttggagagcatttatt

SEQ ID NO: 1103 - DNA, 23 bp, Homo sapiens
  source 1..23: mol_type = other DNA
ttgcttacatactgcatttgaaa

SEQ ID NO: 1104 - DNA, 23 bp, Homo sapiens
  source 1..23: mol_type = other DNA
tgcttacatactgcatttgaaat

SEQ ID NO: 1105 - DNA, 23 bp, Homo sapiens
  source 1..23: mol_type = other DNA
tggttctaacgcctgtaatcaac

SEQ ID NO: 1106 - DNA, 23 bp, Homo sapiens
  source 1..23: mol_type = other DNA
tcgatgattgtcatgataacagt

SEQ ID NO: 1107 - DNA, 23 bp, Homo sapiens
  source 1..23: mol_type = other DNA
cacccaatacacctgtgataatc

SEQ ID NO: 1108 - DNA, 23 bp, Homo sapiens
  source 1..23: mol_type = other DNA
acccaatacacctgtgataatca

SEQ ID NO: 1109 - DNA, 23 bp, Homo sapiens
  source 1..23: mol_type = other DNA
accagtgtatctcaaagaactgg

SEQ ID NO: 1110 - DNA, 23 bp, Homo sapiens
  source 1..23: mol_type = other DNA
atgaaaagaactgcaattcgaca

SEQ ID NO: 1111 - DNA, 23 bp, Homo sapiens
  source 1..23: mol_type = other DNA
ccccaatcatcgatgtattgacc

SEQ ID NO: 1112 - DNA, 23 bp, Homo sapiens
  source 1..23: mol_type = other DNA
tcgatgtattgacctatcgtttg

SEQ ID NO: 1113 - DNA, 23 bp, Homo sapiens
  source 1..23: mol_type = other DNA
atgtattgacctatcgtttgtct

SEQ ID NO: 1114 - DNA, 23 bp, Homo sapiens
  source 1..23: mol_type = other DNA
tcgttgtgatggtgtttttgatt

SEQ ID NO: 1115 - DNA, 23 bp, Homo sapiens
  source 1..23: mol_type = other DNA
cccgaacttctgggaatgtgatg

SEQ ID NO: 1116 - DNA, 23 bp, Homo sapiens
  source 1..23: mol_type = other DNA
ccgaacttctgggaatgtgatgg

SEQ ID NO: 1117 - DNA, 23 bp, Homo sapiens
  source 1..23: mol_type = other DNA
cccaagacttgcccttcatcata

SEQ ID NO: 1118 - DNA, 23 bp, Homo sapiens
  source 1..23: mol_type = other DNA
ttcttacttgccaatgattctaa

SEQ ID NO: 1119 - DNA, 23 bp, Homo sapiens
  source 1..23: mol_type = other DNA
aagacatagatgaatgtgatatt

SEQ ID NO: 1120 - DNA, 23 bp, Homo sapiens
  source 1..23: mol_type = other DNA
gacatagatgaatgtgatattct

SEQ ID NO: 1121 - DNA, 23 bp, Homo sapiens
  source 1..23: mol_type = other DNA
gtgtgatacaggctacatgttag

SEQ ID NO: 1122 - DNA, 23 bp, Homo sapiens
  source 1..23: mol_type = other DNA
aggctacatgttagaaagtgatg

SEQ ID NO: 1123 - DNA, 23 bp, Homo sapiens
  source 1..23: mol_type = other DNA
ggctacatgttagaaagtgatgg

SEQ ID NO: 1124 - DNA, 23 bp, Homo sapiens
  source 1..23: mol_type = other DNA
gtcgagaatggttcttacattgt

SEQ ID NO: 1125 - DNA, 23 bp, Homo sapiens
  source 1..23: mol_type = other DNA
gagaatggttcttacattgtagc

SEQ ID NO: 1126 - DNA, 23 bp, Homo sapiens
  source 1..23: mol_type = other DNA
tacattgtagctgttgattttga

SEQ ID NO: 1127 - DNA, 23 bp, Homo sapiens
  source 1..23: mol_type = other DNA
agctgttgattttgattcaatta

SEQ ID NO: 1128 - DNA, 23 bp, Homo sapiens
  source 1..23: mol_type = other DNA
ctgttgattttgattcaattagt

SEQ ID NO: 1129 - DNA, 23 bp, Homo sapiens
  source 1..23: mol_type = other DNA
ttcaattagtggtcgtatctttt

SEQ ID NO: 1130 - DNA, 23 bp, Homo sapiens
  source 1..23: mol_type = other DNA
agcatcatcttgactgaaactat

SEQ ID NO: 1131 - DNA, 23 bp, Homo sapiens
  source 1..23: mol_type = other DNA
atcatcttgactgaaactattgc

SEQ ID NO: 1132 - DNA, 23 bp, Homo sapiens
  source 1..23: mol_type = other DNA
ttgactgaaactattgcaataga

SEQ ID NO: 1133 - DNA, 23 bp, Homo sapiens
  source 1..23: mol_type = other DNA
gactgaaactattgcaatagatt

SEQ ID NO: 1134 - DNA, 23 bp, Homo sapiens
  source 1..23: mol_type = other DNA
ctgaaactattgcaatagattgg

SEQ ID NO: 1135 - DNA, 23 bp, Homo sapiens
  source 1..23: mol_type = other DNA
aacaattgaagtctccaaaattg

SEQ ID NO: 1136 - DNA, 23 bp, Homo sapiens
  source 1..23: mol_type = other DNA
tgctgattagtaaaaacctaaca

SEQ ID NO: 1137 - DNA, 23 bp, Homo sapiens
  source 1..23: mol_type = other DNA
tagcattagatcccagaatgaat

SEQ ID NO: 1138 - DNA, 23 bp, Homo sapiens
  source 1..23: mol_type = other DNA
agcattagatcccagaatgaatg

SEQ ID NO: 1139 - DNA, 23 bp, Homo sapiens
  source 1..23: mol_type = other DNA
cagaatgaatgagcatctactgt

SEQ ID NO: 1140 - DNA, 23 bp, Homo sapiens
  source 1..23: mol_type = other DNA
atggacttttgtgattataatgg

SEQ ID NO: 1141 - DNA, 23 bp, Homo sapiens
  source 1..23: mol_type = other DNA
gacttttgtgattataatggaca

SEQ ID NO: 1142 - DNA, 19 bp, Homo sapiens
  source 1..19: mol_type = other DNA
gtgatttgattatacggca

SEQ ID NO: 1143 - DNA, 23 bp, Homo sapiens
  source 1..23: mol_type = other DNA
gtcagttgtaatgtataatattc

SEQ ID NO: 1144 - DNA, 23 bp, Homo sapiens
  source 1..23: mol_type = other DNA
ttgtaatgtataatattcaatgg

SEQ ID NO: 1145 - DNA, 23 bp, Homo sapiens
  source 1..23: mol_type = other DNA
atccttcgaaacaaccaaattcc

SEQ ID NO: 1146 - DNA, 23 bp, Homo sapiens
  source 1..23: mol_type = other DNA
ttcgaaacaaccaaattccgtga

SEQ ID NO: 1147 - DNA, 23 bp, Homo sapiens
  source 1..23: mol_type = other DNA
aacctttcttaataactgtaagg

SEQ ID NO: 1148 - DNA, 23 bp, Homo sapiens
  source 1..23: mol_type = other DNA
aggcaacatataatttttggaat

SEQ ID NO: 1149 - DNA, 23 bp, Homo sapiens
  source 1..23: mol_type = other DNA
ggcaacatataatttttggaatc

SEQ ID NO: 1150 - DNA, 23 bp, Homo sapiens
  source 1..23: mol_type = other DNA
agggatacagaatggtttagatg

SEQ ID NO: 1151 - DNA, 23 bp, Homo sapiens
  source 1..23: mol_type = other DNA
gggatacagaatggtttagatgt

SEQ ID NO: 1152 - DNA, 23 bp, Homo sapiens
  source 1..23: mol_type = other DNA
cagaatggtttagatgttgaatt

SEQ ID NO: 1153 - DNA, 23 bp, Homo sapiens
  source 1..23: mol_type = other DNA
tacatctattgggttgaaaatcc

SEQ ID NO: 1154 - DNA, 23 bp, Homo sapiens
  source 1..23: mol_type = other DNA
aggacagtatttgcttctatatc

SEQ ID NO: 1155 - DNA, 23 bp, Homo sapiens
  source 1..23: mol_type = other DNA
cagtatttgcttctatatctatg

SEQ ID NO: 1156 - DNA, 21 bp, Homo sapiens
  source 1..21: mol_type = other DNA
ccttctatgaacctggcctta

SEQ ID NO: 1157 - DNA, 23 bp, Homo sapiens
  source 1..23: mol_type = other DNA
gccttagattggatttcaagaaa

SEQ ID NO: 1158 - DNA, 23 bp, Homo sapiens
  source 1..23: mol_type = other DNA
tggatttcaagaaacctttattc

SEQ ID NO: 1159 - DNA, 23 bp, Homo sapiens
  source 1..23: mol_type = other DNA
ctcagtcaatcgaggttttgaca

SEQ ID NO: 1160 - DNA, 23 bp, Homo sapiens
  source 1..23: mol_type = other DNA
acggagatatcagatacagaaaa

SEQ ID NO: 1161 - DNA, 23 bp, Homo sapiens
  source 1..23: mol_type = other DNA
cggagatatcagatacagaaaaa

SEQ ID NO: 1162 - DNA, 23 bp, Homo sapiens
  source 1..23: mol_type = other DNA
gagatatcagatacagaaaaaca

SEQ ID NO: 1163 - DNA, 23 bp, Homo sapiens
  source 1..23: mol_type = other DNA
cagatacagaaaaacattgattg

SEQ ID NO: 1164 - DNA, 23 bp, Homo sapiens
  source 1..23: mol_type = other DNA
gtccatgattctttcctttatta

SEQ ID NO: 1165 - DNA, 23 bp, Homo sapiens
  source 1..23: mol_type = other DNA
tccatgattctttcctttattat

SEQ ID NO: 1166 - DNA, 23 bp, Homo sapiens
  source 1..23: mol_type = other DNA
ttctttcctttattatactgatg

SEQ ID NO: 1167 - DNA, 23 bp, Homo sapiens
  source 1..23: mol_type = other DNA
aacagtatgaggtcattgaaaga

SEQ ID NO: 1168 - DNA, 23 bp, Homo sapiens
  source 1..23: mol_type = other DNA
ttgagagataatgttccaaatct

SEQ ID NO: 1169 - DNA, 23 bp, Homo sapiens
  source 1..23: mol_type = other DNA
gagagataatgttccaaatctga

SEQ ID NO: 1170 - DNA, 23 bp, Homo sapiens
  source 1..23: mol_type = other DNA
gagataatgttccaaatctgagg

SEQ ID NO: 1171 - DNA, 19 bp, Homo sapiens
  source 1..19: mol_type = other DNA
cctcaaatggctgtagcaa

SEQ ID NO: 1172 - DNA, 23 bp, Homo sapiens
  source 1..23: mol_type = other DNA
ctctccatataactctttcattg

SEQ ID NO: 1173 - DNA, 23 bp, Homo sapiens
  source 1..23: mol_type = other DNA
tccatataactctttcattgttg

SEQ ID NO: 1174 - DNA, 23 bp, Homo sapiens
  source 1..23: mol_type = other DNA
aactctttcattgttgtttcaat

SEQ ID NO: 1175 - DNA, 23 bp, Homo sapiens
  source 1..23: mol_type = other DNA
ctctttcattgttgtttcaatgc

SEQ ID NO: 1176 - DNA, 23 bp, Homo sapiens
  source 1..23: mol_type = other DNA
ctgcaatcagaggctttagcttg

SEQ ID NO: 1177 - DNA, 23 bp, Homo sapiens
  source 1..23: mol_type = other DNA
tgcaatcagaggctttagcttgg

SEQ ID NO: 1178 - DNA, 23 bp, Homo sapiens
  source 1..23: mol_type = other DNA
gaggctttagcttggaattgtca

SEQ ID NO: 1179 - DNA, 23 bp, Homo sapiens
  source 1..23: mol_type = other DNA
ggctttagcttggaattgtcaga

SEQ ID NO: 1180 - DNA, 23 bp, Homo sapiens
  source 1..23: mol_type = other DNA
ttggaattgtcagatcattcaga

SEQ ID NO: 1181 - DNA, 23 bp, Homo sapiens
  source 1..23: mol_type = other DNA
tggatcttctctgatgaacattg

SEQ ID NO: 1182 - DNA, 23 bp, Homo sapiens
  source 1..23: mol_type = other DNA
aacattgtgacacatggaatagg

SEQ ID NO: 1183 - DNA, 23 bp, Homo sapiens
  source 1..23: mol_type = other DNA
ttctgaaacactgatagaagttc

SEQ ID NO: 1184 - DNA, 23 bp, Homo sapiens
  source 1..23: mol_type = other DNA
tagaagttctgcggatcaatact

SEQ ID NO: 1185 - DNA, 23 bp, Homo sapiens
  source 1..23: mol_type = other DNA
ttgttgtagatcccaagaacaga

SEQ ID NO: 1186 - DNA, 23 bp, Homo sapiens
  source 1..23: mol_type = other DNA
accaaagattgagcgttctttcc

SEQ ID NO: 1187 - DNA, 23 bp, Homo sapiens
  source 1..23: mol_type = other DNA
ccgaagtgatggctacgtttatt

SEQ ID NO: 1188 - DNA, 23 bp, Homo sapiens
  source 1..23: mol_type = other DNA
tgggttgatgattctttagatat

SEQ ID NO: 1189 - DNA, 23 bp, Homo sapiens
  source 1..23: mol_type = other DNA
ttgatgattctttagatataatt

SEQ ID NO: 1190 - DNA, 23 bp, Homo sapiens
  source 1..23: mol_type = other DNA
cactgtttttgaaaattctatca

SEQ ID NO: 1191 - DNA, 23 bp, Homo sapiens
  source 1..23: mol_type = other DNA
ctgtttttgaaaattctatcata

SEQ ID NO: 1192 - DNA, 23 bp, Homo sapiens
  source 1..23: mol_type = other DNA
tgggtagataggaatttgaaaaa

SEQ ID NO: 1193 - DNA, 23 bp, Homo sapiens
  source 1..23: mol_type = other DNA
gggtagataggaatttgaaaaag

SEQ ID NO: 1194 - DNA, 23 bp, Homo sapiens
  source 1..23: mol_type = other DNA
cacagtgataagagacaatatca

SEQ ID NO: 1195 - DNA, 23 bp, Homo sapiens
  source 1..23: mol_type = other DNA
cagtgataagagacaatatcaac

SEQ ID NO: 1196 - DNA, 23 bp, Homo sapiens
  source 1..23: mol_type = other DNA
ggcaagaattgtgccatttcaac

SEQ ID NO: 1197 - DNA, 23 bp, Homo sapiens
  source 1..23: mol_type = other DNA
aagaattgtgccatttcaacaga

SEQ ID NO: 1198 - DNA, 23 bp, Homo sapiens
  source 1..23: mol_type = other DNA
gtgccatttcaacagaaaatttc

SEQ ID NO: 1199 - DNA, 23 bp, Homo sapiens
  source 1..23: mol_type = other DNA
tgccatttcaacagaaaatttcc

SEQ ID NO: 1200 - DNA, 23 bp, Homo sapiens
  source 1..23: mol_type = other DNA
ctcatctttgccttgtctaattc

SEQ ID NO: 1201 - DNA, 23 bp, Homo sapiens
  source 1..23: mol_type = other DNA
acctttccaaacaataaatgtgg

SEQ ID NO: 1202 - DNA, 23 bp, Homo sapiens
  source 1..23: mol_type = other DNA
gactatgacagtgtaagtgatag

SEQ ID NO: 1203 - DNA, 23 bp, Homo sapiens
  source 1..23: mol_type = other DNA
cagtgtaagtgatagaatctact

SEQ ID NO: 1204 - DNA, 23 bp, Homo sapiens
  source 1..23: mol_type = other DNA
gtgtaagtgatagaatctacttc

SEQ ID NO: 1205 - DNA, 23 bp, Homo sapiens
  source 1..23: mol_type = other DNA
tagaatctacttcacacaaaatt

SEQ ID NO: 1206 - DNA, 23 bp, Homo sapiens
  source 1..23: mol_type = other DNA
atctacttcacacaaaatttagc

SEQ ID NO: 1207 - DNA, 23 bp, Homo sapiens
  source 1..23: mol_type = other DNA
gcctttgactggattactagaag

SEQ ID NO: 1208 - DNA, 23 bp, Homo sapiens
  source 1..23: mol_type = other DNA
gactggattactagaagaattta

SEQ ID NO: 1209 - DNA, 23 bp, Homo sapiens
  source 1..23: mol_type = other DNA
ctggattactagaagaatttatt

SEQ ID NO: 1210 - DNA, 23 bp, Homo sapiens
  source 1..23: mol_type = other DNA
tggattactagaagaatttatta

SEQ ID NO: 1211 - DNA, 23 bp, Homo sapiens
  source 1..23: mol_type = other DNA
gactctctatggccagtatattt

SEQ ID NO: 1212 - DNA, 23 bp, Homo sapiens
  source 1..23: mol_type = other DNA
ctgacttgtacacacaaagaatt

SEQ ID NO: 1213 - DNA, 23 bp, Homo sapiens
  source 1..23: mol_type = other DNA
gacttgtacacacaaagaattta

SEQ ID NO: 1214 - DNA, 23 bp, Homo sapiens
  source 1..23: mol_type = other DNA
tacacacaaagaatttaccgagc

SEQ ID NO: 1215 - DNA, 23 bp, Homo sapiens
  source 1..23: mol_type = other DNA
accagaaacaacagtgtaacaat

SEQ ID NO: 1216 - DNA, 23 bp, Homo sapiens
  source 1..23: mol_type = other DNA
cagaaacaacagtgtaacaatcc

SEQ ID NO: 1217 - DNA, 23 bp, Homo sapiens
  source 1..23: mol_type = other DNA
aacaatccttgtgaacagtttaa

SEQ ID NO: 1218 - DNA, 23 bp, Homo sapiens
  source 1..23: mol_type = other DNA
gtggacaatggtgaacgatgtgg

SEQ ID NO: 1219 - DNA, 23 bp, Homo sapiens
  source 1..23: mol_type = other DNA
cggagtttatgtgcaataacaga

SEQ ID NO: 1220 - DNA, 23 bp, Homo sapiens
  source 1..23: mol_type = other DNA
gagtttatgtgcaataacagaag

SEQ ID NO: 1221 - DNA, 23 bp, Homo sapiens
  source 1..23: mol_type = other DNA
tggatacacaaaatgtcataatt

SEQ ID NO: 1222 - DNA, 23 bp, Homo sapiens
  source 1..23: mol_type = other DNA
tacacaaaatgtcataattcaaa

SEQ ID NO: 1223 - DNA, 23 bp, Homo sapiens
  source 1..23: mol_type = other DNA
cacaaaatgtcataattcaaata

SEQ ID NO: 1224 - DNA, 23 bp, Homo sapiens
  source 1..23: mol_type = other DNA
gtcataattcaaatatttgtatt

SEQ ID NO: 1225 - DNA, 23 bp, Homo sapiens
  source 1..23: mol_type = other DNA
ttgtattcctcgcgtttatttgt

SEQ ID NO: 1226 - DNA, 23 bp, Homo sapiens
  source 1..23: mol_type = other DNA
gtgatgaaaaccctacttattgc

SEQ ID NO: 1227 - DNA, 23 bp, Homo sapiens
  source 1..23: mol_type = other DNA
tcctcaacattggtattgtgatc

SEQ ID NO: 1228 - DNA, 23 bp, Homo sapiens
  source 1..23: mol_type = other DNA
tggtattgtgatcaagaaacaga

SEQ ID NO: 1229 - DNA, 23 bp, Homo sapiens
  source 1..23: mol_type = other DNA
gtgatcaagaaacagattgtttt

SEQ ID NO: 1230 - DNA, 23 bp, Homo sapiens
  source 1..23: mol_type = other DNA
ttccgagtttctctgtgtaaatg

SEQ ID NO: 1231 - DNA, 23 bp, Homo sapiens
  source 1..23: mol_type = other DNA
tccgagtttctctgtgtaaatga

SEQ ID NO: 1232 - DNA, 23 bp, Homo sapiens
  source 1..23: mol_type = other DNA
cggctacgatgagaatcagaatt

SEQ ID NO: 1233 - DNA, 23 bp, Homo sapiens
  source 1..23: mol_type = other DNA
aggagaacttgctctgaaaatga

SEQ ID NO: 1234 - DNA, 23 bp, Homo sapiens
  source 1..23: mol_type = other DNA
gactgtgtatcccaaagatattc

SEQ ID NO: 1235 - DNA, 23 bp, Homo sapiens
  source 1..23: mol_type = other DNA
gccaacagaatcagtttacctgt

SEQ ID NO: 1236 - DNA, 23 bp, Homo sapiens
  source 1..23: mol_type = other DNA
gacaccttaaccagtttctattg

SEQ ID NO: 1237 - DNA, 23 bp, Homo sapiens
  source 1..23: mol_type = other DNA
accttaaccagtttctattgttc

SEQ ID NO: 1238 - DNA, 23 bp, Homo sapiens
  source 1..23: mol_type = other DNA
gacttgtgttgatattgatgaat

SEQ ID NO: 1239 - DNA, 23 bp, Homo sapiens
  source 1..23: mol_type = other DNA
atgtaataggctcctacatctgt

SEQ ID NO: 1240 - DNA, 23 bp, Homo sapiens
  source 1..23: mol_type = other DNA
ccggcaaaacagtaacatcgaac

SEQ ID NO: 1241 - DNA, 23 bp, Homo sapiens
  source 1..23: mol_type = other DNA
accctatctcatttttagcaacc

SEQ ID NO: 1242 - DNA, 23 bp, Homo sapiens
  source 1..23: mol_type = other DNA
aaccgttactatttgagaaattt

SEQ ID NO: 1243 - DNA, 23 bp, Homo sapiens
  source 1..23: mol_type = other DNA
accgttactatttgagaaattta

SEQ ID NO: 1244 - DNA, 23 bp, Homo sapiens
  source 1..23: mol_type = other DNA
ccgttactatttgagaaatttaa

SEQ ID NO: 1245 - DNA, 23 bp, Homo sapiens
  source 1..23: mol_type = other DNA
tactatttgagaaatttaactat

SEQ ID NO: 1246 - DNA, 23 bp, Homo sapiens
  source 1..23: mol_type = other DNA
ttgagaaatttaactatagatgg

SEQ ID NO: 1247 - DNA, 23 bp, Homo sapiens
  source 1..23: mol_type = other DNA
aactatagatggctatttttact

SEQ ID NO: 1248 - DNA, 23 bp, Homo sapiens
  source 1..23: mol_type = other DNA
gacaatgttgtggcattagattt

SEQ ID NO: 1249 - DNA, 23 bp, Homo sapiens
  source 1..23: mol_type = other DNA
gagaagagattgtattggattga

SEQ ID NO: 1250 - DNA, 23 bp, Homo sapiens
  source 1..23: mol_type = other DNA
ggcaagtcattgagagaatgttt

SEQ ID NO: 1251 - DNA, 23 bp, Homo sapiens
  source 1..23: mol_type = other DNA
gacaaacaaggagacaatcataa

SEQ ID NO: 1252 - DNA, 23 bp, Homo sapiens
  source 1..23: mol_type = other DNA
aaccaacaagtctgtgataatct

SEQ ID NO: 1253 - DNA, 23 bp, Homo sapiens
  source 1..23: mol_type = other DNA
ttcgctattaccatttttgaaga

SEQ ID NO: 1254 - DNA, 23 bp, Homo sapiens
  source 1..23: mol_type = other DNA
cgctattaccatttttgaagaca

SEQ ID NO: 1255 - DNA, 23 bp, Homo sapiens
  source 1..23: mol_type = other DNA
cagtggaaaagggaaacaaatat

SEQ ID NO: 1256 - DNA, 23 bp, Homo sapiens
  source 1..23: mol_type = other DNA
aacaaatatgatggatcaaatag

SEQ ID NO: 1257 - DNA, 23 bp, Homo sapiens
  source 1..23: mol_type = other DNA
tccatgtgtaccatccatatagg

SEQ ID NO: 1258 - DNA, 23 bp, Homo sapiens
  source 1..23: mol_type = other DNA
ctgatgaagaccgtcttctttgt

SEQ ID NO: 1259 - DNA, 23 bp, Homo sapiens
  source 1..23: mol_type = other DNA
gtgacaacttcacagaattcagc

SEQ ID NO: 1260 - DNA, 23 bp, Homo sapiens
  source 1..23: mol_type = other DNA
cagtgtacaagtggacattgtgt

SEQ ID NO: 1261 - DNA, 23 bp, Homo sapiens
  source 1..23: mol_type = other DNA
gtgtacaagtggacattgtgtac

SEQ ID NO: 1262 - DNA, 23 bp, Homo sapiens
  source 1..23: mol_type = other DNA
tactatgttcgaatgcaaaaacc

SEQ ID NO: 1263 - DNA, 23 bp, Homo sapiens
  source 1..23: mol_type = other DNA
atgttcgaatgcaaaaaccatgt

SEQ ID NO: 1264 - DNA, 23 bp, Homo sapiens
  source 1..23: mol_type = other DNA
atgcaaaaaccatgtttgtatcc

SEQ ID NO: 1265 - DNA, 23 bp, Homo sapiens
  source 1..23: mol_type = other DNA
ccgccatattggaaatgtgatgg

SEQ ID NO: 1266 - DNA, 23 bp, Homo sapiens
  source 1..23: mol_type = other DNA
tggttcagatgaagaacttcacc

SEQ ID NO: 1267 - DNA, 23 bp, Homo sapiens
  source 1..23: mol_type = other DNA
gacaacaatcgctgcatttatag

SEQ ID NO: 1268 - DNA, 23 bp, Homo sapiens
  source 1..23: mol_type = other DNA
cccctaaaccttgtacagaatat

SEQ ID NO: 1269 - DNA, 23 bp, Homo sapiens
  source 1..23: mol_type = other DNA
ccctaaaccttgtacagaatatg

SEQ ID NO: 1270 - DNA, 23 bp, Homo sapiens
  source 1..23: mol_type = other DNA
aaccttgtacagaatatgaatat

SEQ ID NO: 1271 - DNA, 23 bp, Homo sapiens
  source 1..23: mol_type = other DNA
accttgtacagaatatgaatata

SEQ ID NO: 1272 - DNA, 23 bp, Homo sapiens
  source 1..23: mol_type = other DNA
ttgtacagaatatgaatataagt

SEQ ID NO: 1273 - DNA, 23 bp, Homo sapiens
  source 1..23: mol_type = other DNA
ccgatgaactgggttgcaataaa

SEQ ID NO: 1274 - DNA, 23 bp, Homo sapiens
  source 1..23: mol_type = other DNA
aagaacatgtgctgaaaatatat

SEQ ID NO: 1275 - DNA, 23 bp, Homo sapiens
  source 1..23: mol_type = other DNA
agcaaaattgtacccaattaaat

SEQ ID NO: 1276 - DNA, 23 bp, Homo sapiens
  source 1..23: mol_type = other DNA
gggttcgaaaccaatgtttttga

SEQ ID NO: 1277 - DNA, 23 bp, Homo sapiens
  source 1..23: mol_type = other DNA
tcgaaaccaatgtttttgacaga

SEQ ID NO: 1278 - DNA, 23 bp, Homo sapiens
  source 1..23: mol_type = other DNA
ctgacaatgtccgaattcgaaaa

SEQ ID NO: 1279 - DNA, 23 bp, Homo sapiens
  source 1..23: mol_type = other DNA
gtccgaattcgaaaatataatct

SEQ ID NO: 1280 - DNA, 23 bp, Homo sapiens
  source 1..23: mol_type = other DNA
ccgaattcgaaaatataatctct

SEQ ID NO: 1281 - DNA, 23 bp, Homo sapiens
  source 1..23: mol_type = other DNA
ctcagagtatcttcaagatgagg

SEQ ID NO: 1282 - DNA, 23 bp, Homo sapiens
  source 1..23: mol_type = other DNA
atcttcaagatgaggaatatatc

SEQ ID NO: 1283 - DNA, 25 bp, Homo sapiens
  source 1..25: mol_type = other DNA
gggctctaggtttggtgctatcaaa

SEQ ID NO: 1284 - DNA, 23 bp, Homo sapiens
  source 1..23: mol_type = other DNA
tgcctacatccccaactttgaat

SEQ ID NO: 1285 - DNA, 23 bp, Homo sapiens
  source 1..23: mol_type = other DNA
aggaagttgacctgaaactgaaa

SEQ ID NO: 1286 - DNA, 23 bp, Homo sapiens
  source 1..23: mol_type = other DNA
gacctgaaactgaaatacgtaat

SEQ ID NO: 1287 - DNA, 23 bp, Homo sapiens
  source 1..23: mol_type = other DNA
acctgaaactgaaatacgtaatg

SEQ ID NO: 1288 - DNA, 23 bp, Homo sapiens
  source 1..23: mol_type = other DNA
acgcattgaggtggctaaacttg

SEQ ID NO: 1289 - DNA, 23 bp, Homo sapiens
  source 1..23: mol_type = other DNA
tcccaaactagggcttatgttct

SEQ ID NO: 1290 - DNA, 23 bp, Homo sapiens
  source 1..23: mol_type = other DNA
gggaaaggaacctaaaatcgagt

SEQ ID NO: 1291 - DNA, 23 bp, Homo sapiens
  source 1..23: mol_type = other DNA
ccgcaacatcctggttttcgagg

SEQ ID NO: 1292 - DNA, 23 bp, Homo sapiens
  source 1..23: mol_type = other DNA
gcctttctatcgattatttgaac

SEQ ID NO: 1293 - DNA, 23 bp, Homo sapiens
  source 1..23: mol_type = other DNA
ttctatcgattatttgaacaatg

SEQ ID NO: 1294 - DNA, 23 bp, Homo sapiens
  source 1..23: mol_type = other DNA
aggacgttattgaaaccataaaa

SEQ ID NO: 1295 - DNA, 23 bp, Homo sapiens
  source 1..23: mol_type = other DNA
gacgttattgaaaccataaaata

SEQ ID NO: 1296 - DNA, 23 bp, Homo sapiens
  source 1..23: mol_type = other DNA
acgttattgaaaccataaaatat

SEQ ID NO: 1297 - DNA, 25 bp, Homo sapiens
  source 1..25: mol_type = other DNA
ggactgataggagagtcattgcaaa

SEQ ID NO: 1298 - DNA, 23 bp, Homo sapiens
  source 1..23: mol_type = other DNA
accagttatactggatatctaag

SEQ ID NO: 1299 - DNA, 23 bp, Homo sapiens
  source 1..23: mol_type = other DNA
gggagaagtatggaaacaaaata

SEQ ID NO: 1300 - DNA, 23 bp, Homo sapiens
  source 1..23: mol_type = other DNA
aagtatggaaacaaaataaattt

SEQ ID NO: 1301 - DNA, 23 bp, Homo sapiens
  source 1..23: mol_type = other DNA
ttcatcaactcagatacaataag

SEQ ID NO: 1302 - DNA, 23 bp, Homo sapiens
  source 1..23: mol_type = other DNA
cggaggaaattgctattttgatg

SEQ ID NO: 1303 - DNA, 23 bp, Homo sapiens
  source 1..23: mol_type = other DNA
aggaaattgctattttgatgaga

SEQ ID NO: 1304 - DNA, 23 bp, Homo sapiens
  source 1..23: mol_type = other DNA
caccggaaaatattgtgaaatgg

SEQ ID NO: 1305 - DNA, 23 bp, Homo sapiens
  source 1..23: mol_type = other DNA
ttgtgaaatggcgttttcaaaag

SEQ ID NO: 1306 - DNA, 23 bp, Homo sapiens
  source 1..23: mol_type = other DNA
caggattcttccactatagaagg

SEQ ID NO: 1307 - DNA, 23 bp, Homo sapiens
  source 1..23: mol_type = other DNA
ggcagatcttaacatggatattg

SEQ ID NO: 1308 - DNA, 23 bp, Homo sapiens
  source 1..23: mol_type = other DNA
ggcaatgagtgaagactttgtca

SEQ ID NO: 1309 - DNA, 23 bp, Homo sapiens
  source 1..23: mol_type = other DNA
atctgaaaatgtggataataaga

SEQ ID NO: 1310 - DNA, 23 bp, Homo sapiens
  source 1..23: mol_type = other DNA
ctgaaaatgtggataataagaat

SEQ ID NO: 1311 - DNA, 23 bp, Homo sapiens
  source 1..23: mol_type = other DNA
gtggataataagaattatggaag

SEQ ID NO: 1312 - DNA, 23 bp, Homo sapiens
  source 1..23: mol_type = other DNA
tggataataagaattatggaagt

SEQ ID NO: 1313 - DNA, 23 bp, Homo sapiens
  source 1..23: mol_type = other DNA
tggaatctcttcaaacgaaaatc

SEQ ID NO: 1314 - DNA, 23 bp, Homo sapiens
  source 1..23: mol_type = other DNA
atctcttcaaacgaaaatctaaa

SEQ ID NO: 1315 - DNA, 23 bp, Homo sapiens
  source 1..23: mol_type = other DNA
ctcttcaaacgaaaatctaaaca

SEQ ID NO: 1316 - DNA, 23 bp, Homo sapiens
  source 1..23: mol_type = other DNA
ttcaaacgaaaatctaaacaaac

SEQ ID NO: 1317 - DNA, 23 bp, Homo sapiens
  source 1..23: mol_type = other DNA
aacgaaaatctaaacaaactacc

SEQ ID NO: 1318 - DNA, 23 bp, Homo sapiens
  source 1..23: mol_type = other DNA
aacaaactaccaactttgaaaat

SEQ ID NO: 1319 - DNA, 23 bp, Homo sapiens
  source 1..23: mol_type = other DNA
taccaactttgaaaatccaatct

SEQ ID NO: 1320 - DNA, 23 bp, Homo sapiens
  source 1..23: mol_type = other DNA
aactttgaaaatccaatctatgc

SEQ ID NO: 1321 - DNA, 23 bp, Homo sapiens
  source 1..23: mol_type = other DNA
tgcaacagaagacacttttaaag

SEQ ID NO: 1322 - DNA, 23 bp, Homo sapiens
  source 1..23: mol_type = other DNA
caccgcaaatcttgttaaagaag

SEQ ID NO: 1323 - DNA, 23 bp, Homo sapiens
  source 1..23: mol_type = other DNA
cgcaaatcttgttaaagaagact

SEQ ID NO: 1324 - DNA, 23 bp, Homo sapiens
  source 1..23: mol_type = other DNA
ctctgaagtatagctataccagc

SEQ ID NO: 1325 - DNA, 23 bp, Homo sapiens
  source 1..23: mol_type = other DNA
accagctatttagggaataatta

SEQ ID NO: 1326 - DNA, 23 bp, Homo sapiens
  source 1..23: mol_type = other DNA
cagctatttagggaataattaga

SEQ ID NO: 1327 - DNA, 23 bp, Homo sapiens
  source 1..23: mol_type = other DNA
aacacacttttgcacatatattt

SEQ ID NO: 1328 - DNA, 23 bp, Homo sapiens
  source 1..23: mol_type = other DNA
cacacttttgcacatatattttt

SEQ ID NO: 1329 - DNA, 23 bp, Homo sapiens
  source 1..23: mol_type = other DNA
tacaaacagatgaaaaaagttaa

SEQ ID NO: 1330 - DNA, 23 bp, Homo sapiens
  source 1..23: mol_type = other DNA
aagttaacattcagtactttatg

SEQ ID NO: 1331 - DNA, 23 bp, Homo sapiens
  source 1..23: mol_type = other DNA
ttcagtactttatgaaaaaaata

SEQ ID NO: 1332 - DNA, 23 bp, Homo sapiens
  source 1..23: mol_type = other DNA
cagtactttatgaaaaaaatata

SEQ ID NO: 1333 - DNA, 23 bp, Homo sapiens
  source 1..23: mol_type = other DNA
ccgtctcatatttttacaaataa

SEQ ID NO: 1334 - DNA, 23 bp, Homo sapiens
  source 1..23: mol_type = other DNA
tacaaataattatcacaatgtac

SEQ ID NO: 1335 - DNA, 23 bp, Homo sapiens
  source 1..23: mol_type = other DNA
atcacaatgtactatatgtatat

SEQ ID NO: 1336 - DNA, 23 bp, Homo sapiens
  source 1..23: mol_type = other DNA
cacaatgtactatatgtatatct

SEQ ID NO: 1337 - DNA, 23 bp, Homo sapiens
  source 1..23: mol_type = other DNA
atgtactatatgtatatctttgc

SEQ ID NO: 1338 - DNA, 23 bp, Homo sapiens
  source 1..23: mol_type = other DNA
ctgaagttgtctgaaggtaatac

SEQ ID NO: 1339 - DNA, 23 bp, Homo sapiens
  source 1..23: mol_type = other DNA
ctgaaggtaatactataaatata

SEQ ID NO: 1340 - DNA, 23 bp, Homo sapiens
  source 1..23: mol_type = other DNA
ttgtaaattttggaaagattatc

SEQ ID NO: 1341 - DNA, 23 bp, Homo sapiens
  source 1..23: mol_type = other DNA
tggaaagattatcctgttactga

SEQ ID NO: 1342 - DNA, 23 bp, Homo sapiens
  source 1..23: mol_type = other DNA
aagattatcctgttactgaattt

SEQ ID NO: 1343 - DNA, 23 bp, Homo sapiens
  source 1..23: mol_type = other DNA
atcctgttactgaatttgctaat

SEQ ID NO: 1344 - DNA, 23 bp, Homo sapiens
  source 1..23: mol_type = other DNA
tcctgttactgaatttgctaata

SEQ ID NO: 1345 - DNA, 23 bp, Homo sapiens
  source 1..23: mol_type = other DNA
tactgaatttgctaataaagatg

SEQ ID NO: 1346 - DNA, 23 bp, Homo sapiens
  source 1..23: mol_type = other DNA
gtgatcattatagtaaatgatcc

SEQ ID NO: 1347 - DNA, 23 bp, Homo sapiens
  source 1..23: mol_type = other DNA
tagtaaatgatccaacaagaaaa

SEQ ID NO: 1348 - DNA, 23 bp, Homo sapiens
  source 1..23: mol_type = other DNA
tccaacaagaaaaggaattgact

SEQ ID NO: 1349 - DNA, 23 bp, Homo sapiens
  source 1..23: mol_type = other DNA
cactcatatttcctataaaatta

SEQ ID NO: 1350 - DNA, 23 bp, Homo sapiens
  source 1..23: mol_type = other DNA
ctcatatttcctataaaattatc

SEQ ID NO: 1351 - DNA, 23 bp, Homo sapiens
  source 1..23: mol_type = other DNA
gtccatttttacacattagcact

SEQ ID NO: 1352 - DNA, 23 bp, Homo sapiens
  source 1..23: mol_type = other DNA
tagcacttaattaatgttcaata

SEQ ID NO: 1353 - DNA, 23 bp, Homo sapiens
  source 1..23: mol_type = other DNA
agcacttaattaatgttcaatat

SEQ ID NO: 1354 - DNA, 23 bp, Homo sapiens
  source 1..23: mol_type = other DNA
cacttaattaatgttcaatatta

SEQ ID NO: 1355 - DNA, 23 bp, Homo sapiens
  source 1..23: mol_type = other DNA
ttcaatattacatgtcaatttga

SEQ ID NO: 1356 - DNA, 23 bp, Homo sapiens
  source 1..23: mol_type = other DNA
ttgattaatggctatgttgatag

SEQ ID NO: 1357 - DNA, 23 bp, Homo sapiens
  source 1..23: mol_type = other DNA
ggccactatgtgttgtatagaca

SEQ ID NO: 1358 - DNA, 23 bp, Homo sapiens
  source 1..23: mol_type = other DNA
cactatgtgttgtatagacatct

SEQ ID NO: 1359 - DNA, 23 bp, Homo sapiens
  source 1..23: mol_type = other DNA
aggtaggaaaagcaattcagttt

SEQ ID NO: 1360 - DNA, 23 bp, Homo sapiens
  source 1..23: mol_type = other DNA
gccaagacaacatttttatttgt

SEQ ID NO: 1361 - DNA, 23 bp, Homo sapiens
  source 1..23: mol_type = other DNA
gacaacatttttatttgtgatgt

SEQ ID NO: 1362 - DNA, 23 bp, Homo sapiens
  source 1..23: mol_type = other DNA
atgaggaaatcccatatcattaa

SEQ ID NO: 1363 - DNA, 23 bp, Homo sapiens
  source 1..23: mol_type = other DNA
tgcattgagtttgtggttaatta

SEQ ID NO: 1364 - DNA, 23 bp, Homo sapiens
  source 1..23: mol_type = other DNA
ttgagtttgtggttaattaaatg

SEQ ID NO: 1365 - DNA, 23 bp, Homo sapiens
  source 1..23: mol_type = other DNA
agctgaatttctgaaaccaaatc

SEQ ID NO: 1366 - DNA, 23 bp, Homo sapiens
  source 1..23: mol_type = other DNA
accaaatctgtgtcttcataaaa

SEQ ID NO: 1367 - DNA, 23 bp, Homo sapiens
  source 1..23: mol_type = other DNA
tgggtttttgtttctatgaaaat

SEQ ID NO: 1368 - DNA, 23 bp, Homo sapiens
  source 1..23: mol_type = other DNA
ttgtttctatgaaaatatcatta

SEQ ID NO: 1369 - DNA, 23 bp, Homo sapiens
  source 1..23: mol_type = other DNA
ttctatgaaaatatcattataat

SEQ ID NO: 1370 - DNA, 23 bp, Homo sapiens
  source 1..23: mol_type = other DNA
atgaaaatatcattataatcact

SEQ ID NO: 1371 - DNA, 23 bp, Homo sapiens
  source 1..23: mol_type = other DNA
atcattataatcactatttattt

SEQ ID NO: 1372 - DNA, 23 bp, Homo sapiens
  source 1..23: mol_type = other DNA
aaccattcttattaagcttttta

SEQ ID NO: 1373 - DNA, 23 bp, Homo sapiens
  source 1..23: mol_type = other DNA
accattcttattaagctttttat

SEQ ID NO: 1374 - DNA, 23 bp, Homo sapiens
  source 1..23: mol_type = other DNA
gtggctaaatgtgtacatttata

SEQ ID NO: 1375 - DNA, 23 bp, Homo sapiens
  source 1..23: mol_type = other DNA
tggctaaatgtgtacatttatat

SEQ ID NO: 1376 - DNA, 23 bp, Homo sapiens
  source 1..23: mol_type = other DNA
ggctaaatgtgtacatttatatt

SEQ ID NO: 1377 - DNA, 23 bp, Homo sapiens
  source 1..23: mol_type = other DNA
atgtgtacatttatattagaatg

SEQ ID NO: 1378 - DNA, 23 bp, Homo sapiens
  source 1..23: mol_type = other DNA
cagatcttttctttaattcttat

SEQ ID NO: 1379 - DNA, 23 bp, Homo sapiens
  source 1..23: mol_type = other DNA
atcttttctttaattcttattgg

SEQ ID NO: 1380 - DNA, 23 bp, Homo sapiens
  source 1..23: mol_type = other DNA
ttctttaattcttattggttttt

SEQ ID NO: 1381 - DNA, 23 bp, Homo sapiens
  source 1..23: mol_type = other DNA
ctcttaaatagtgggtatagtct

SEQ ID NO: 1382 - DNA, 23 bp, Homo sapiens
  source 1..23: mol_type = other DNA
gtgctaatattgcacatttgtta

SEQ ID NO: 1383 - DNA, 23 bp, Homo sapiens
  source 1..23: mol_type = other DNA
tgctaatattgcacatttgttaa

SEQ ID NO: 1384 - DNA, 23 bp, Homo sapiens
  source 1..23: mol_type = other DNA
atggatgaatgaatgaaacatat

SEQ ID NO: 1385 - DNA, 23 bp, Homo sapiens
  source 1..23: mol_type = other DNA
atgaatgaaacatatactactga

SEQ ID NO: 1386 - DNA, 23 bp, Homo sapiens
  source 1..23: mol_type = other DNA
atgaaacatatactactgattat

SEQ ID NO: 1387 - DNA, 23 bp, Homo sapiens
  source 1..23: mol_type = other DNA
aacatatactactgattatttta

SEQ ID NO: 1388 - DNA, 23 bp, Homo sapiens
  source 1..23: mol_type = other DNA
ctgactgtaattactttgattag

SEQ ID NO: 1389 - DNA, 23 bp, Homo sapiens
  source 1..23: mol_type = other DNA
ctgtaattactttgattagataa

SEQ ID NO: 1390 - DNA, 23 bp, Homo sapiens
  source 1..23: mol_type = other DNA
tagataaacaactggaaataatg

SEQ ID NO: 1391 - DNA, 23 bp, Homo sapiens
  source 1..23: mol_type = other DNA
ctgctgaaaaagttctaataaat

SEQ ID NO: 1392 - DNA, 23 bp, Homo sapiens
  source 1..23: mol_type = other DNA
tgctgaaaaagttctaataaatg

SEQ ID NO: 1393 - DNA, 21 bp, Homo sapiens
  source 1..21: mol_type = other DNA
ccctcagagacctgagctctt

SEQ ID NO: 1394 - DNA, 21 bp, Homo sapiens
  source 1..21: mol_type = other DNA
cctgtaataaacactactctt
